(19) United States
(12) Patent Application Publication
(10) Pub. No.: US 2005/0233328 A1
(43) Pub. Date: Oct. 20, 2005

(54) Methods of identifying compounds that modulate protein activity

(76) Inventors: Constance Berghs, New Haven, CT (US); Karen Ellerman, Branford, CT (US); Xiaojia (Sasha) Guo, Branford, CT (US); Li Li, Branford, CT (US); Tatiana Ort, Milford, CT (US); Daniel Rieger, Branford, CT (US); Corine A.M. Vernet, Chernex (CH); Mei Zhong, Branford, CT (US)

Correspondence Address: Jenell Lawson;Intellectual Property, CuraGen Corportation, 555 Long Wharf Drive, New Haven, CT, 06551, US

(21) Appl. No.: 10/635,407

(22) Filed: Aug. 6, 2003

Related U.S. Application Data
(63) Continuation-in-part of application No. 10/307,817, filed on Dec. 2, 2002.
(60) Provisional application No. 60/336,881, filed on Dec. 3, 2001.
(60) Provisional application No. 60/336,820, filed on Dec. 5, 2001.
(60) Provisional application No. 60/361,770, filed on Mar. 5, 2002.
(60) Provisional application No. 60/364,238, filed on Mar. 13, 2002.
(60) Provisional application No. 60/338,285, filed on Dec. 7, 2001.
(60) Provisional application No. 60/383,829, filed on May 29, 2002.
(60) Provisional application No. 60/383,534, filed on May 28, 2002.
(60) Provisional application No. 60/338,318, filed on Dec. 7, 2001.
(60) Provisional application No. 60/404,676, filed on Aug. 20, 2002.
(60) Provisional application No. 60/353,288, filed on Feb. 1, 2002.
(60) Provisional application No. 60/362,230, filed on Mar. 5, 2002.
(60) Provisional application No. 60/364,181, filed on Mar. 13, 2002.
(60) Provisional application No. 60/339,022, filed on Dec. 10, 2001.
(60) Provisional application No. 60/353,286, filed on Feb. 1, 2002.
(60) Provisional application No. 60/364,978, filed on Mar. 15, 2002.
(60) Provisional application No. 60/338,989, filed on Dec. 10, 2001.
(60) Provisional application No. 60/359,956, filed on Feb. 27, 2002.
(60) Provisional application No. 60/360,964, filed on Feb. 28, 2002.
(60) Provisional application No. 60/405,698, filed on Aug. 23, 2002.
(60) Provisional application No. 60/339,314, filed on Dec. 11, 2001.
(60) Provisional application No. 60/339,517, filed on Dec. 11, 2001.
(60) Provisional application No. 60/361,256, filed on Feb. 28, 2002.
(60) Provisional application No. 60/339,611, filed on Dec. 11, 2001.
(60) Provisional application No. 60/359,914, filed on Feb. 27, 2002.
(60) Provisional application No. 60/405,400, filed on Aug. 23, 2002.
(60) Provisional application No. 60/339,516, filed on Dec. 11, 2001.
(60) Provisional application No. 60/359,626, filed on Feb. 26, 2002.
(60) Provisional application No. 60/361,264, filed on Feb. 28, 2002.
(60) Provisional application No. 60/365,025, filed on Mar. 15, 2002.
(60) Provisional application No. 60/405,684, filed on Aug. 23, 2002.
(60) Provisional application No. 60/340,981, filed on Dec. 12, 2001.
(60) Provisional application No. 60/340,565, filed on Dec. 14, 2001.
(60) Provisional application No. 60/359,671, filed on Feb. 26, 2002.
(60) Provisional application No. 60/360,924, filed on Feb. 28, 2002.
(60) Provisional application No. 60/381,004, filed on May 16, 2002.
(60) Provisional application No. 60/401,315, filed on Aug. 6, 2002.
(60) Provisional application No. 60/340,608, filed on Dec. 14, 2001.
(60) Provisional application No. 60/405,687, filed on Aug. 23, 2002.
(60) Provisional application No. 60/340,440, filed on Dec. 14, 2001.
(60) Provisional application No. 60/361,028, filed on Feb. 28, 2002.
(60) Provisional application No. 60/341,144, filed on Dec. 14, 2001.
(60) Provisional application No. 60/359,599, filed on Feb. 26, 2002.
(60) Provisional application No. 60/393,332, filed on Jul. 2, 2002.
(60) Provisional application No. 60/341,346, filed on Dec. 12, 2001.
(60) Provisional application No. 60/341,477, filed on Dec. 17, 2001.
(60) Provisional application No. 60/381,495, filed on May 17, 2002.
(60) Provisional application No. 60/401,788, filed on Aug. 7, 2002.
(60) Provisional application No. 60/341,540, filed on Dec. 17, 2001.
(60) Provisional application No. 60/383,744, filed on May 28, 2002.
(60) Provisional application No. 60/342,592, filed on Dec. 20, 2001.
(60) Provisional application No. 60/340,390, filed on Dec. 14, 2001.
(60) Provisional application No. 60/344,903, filed on Dec. 31, 2001.
(60) Provisional application No. 60/384,024, filed on May 29, 2002.
(60) Provisional application No. 60/373,288, filed on Apr. 17, 2002.
(60) Provisional application No. 60/380,981, filed on May 15, 2002.
(60) Provisional application No. 60/406,353, filed on Aug. 26, 2002.
(60) Provisional application No. 60/341,768, filed on Dec. 18, 2001.

(51) Int. Cl. C12Q 1/68; G01N 33/53; C07H 21/04; C12N 9/64; C12N 15/09; C12P 21/06

(52) U.S. Cl. 435/6; 435/7.1; 435/69.1; 435/226; 435/320.1; 435/325; 536/23.2; 530/388.26

(57) ABSTRACT

Methods of identifying compounds that modulate target polypeptide activity, where a test compound is combined with a target polypeptide and a substrate of the target polypeptide and where a determination is made as to whether the test compound modulates activity of the target polypeptide. The test compounds could be small molecule drugs used for treatment of obesity, diabetes, insulin resistance, and for enhancement of insulin secretion. Target polypeptides and their corresponding nucleic acids as well as their variants are also disclosed.

### RELATED APPLICATIONS

[0001] This application is a continuation-in-part of U.S. Ser. No. 10/307,817 filed Dec. 2, 2002, which claims the benefit of U.S. Ser. No. 60/336,881, filed Dec. 3, 2001; U.S. Ser. No. 60/336,820, filed Dec. 5, 2001; U.S. Ser. No. 60/361,770, filed Mar. 5, 2002; U.S. Ser. No. 60/364,238, filed Mar. 13, 2002; U.S. Ser. No. 60/338,285, filed Dec. 7, 2001; U.S. Ser. No. 60/383,829, filed May 29, 2002; U.S. Ser. No. 60/383,534, filed May 28, 2002; U.S. Ser. No. 60/338,318, filed Dec. 7, 2001; U.S. Ser. No. 60/404,676, filed Aug. 20, 2002; U.S. Ser. No. 60/353,288, filed Feb. 1, 2001; U.S. Ser. No. 60/362,230, filed Mar. 5, 2002; U.S. Ser. No. 60/364,181, filed Mar. 13, 2002; U.S. Ser. No. 60/339,022, filed Dec. 10, 2001; U.S. Ser. No. 60/353,286, filed Feb. 1, 2002; U.S. Ser. No. 60/364,978, filed Mar. 15, 2002; U.S. Ser. No. 60/338,989, filed Dec. 10, 2001; U.S. Ser. No. 60/359,956, filed Feb. 27, 2002; U.S. Ser. No. 60/360,964, filed Feb. 28, 2002; U.S. Ser. No. 60/405,698, filed Aug. 23, 2002; U.S. Ser. No. 60/339,314, filed Dec. 11, 2001; U.S. Ser. No. 60/339,517, filed Dec. 11, 2001; U.S. Ser. No. 60/361,256, filed Feb. 28, 2002; U.S. Ser. No. 60/339,611, filed Dec. 11, 2001; U.S. Ser. No. 60/359,914, filed Feb. 27, 2002; U.S. Ser. No. 60/405,400, filed Aug. 23, 2002; U.S. Ser. No. 60/339,516, filed Dec. 11, 2001; U.S. Ser. No. 60/359,626, filed Feb. 26, 2002; U.S. Ser. No. 60/361,264, filed Feb. 28, 2002; U.S. Ser. No. 60/365,025, filed Mar. 15, 2002; U.S. Ser. No. 60/405,684, filed Aug. 23, 2002; U.S. Ser. No. 60/340,981, filed Dec. 12, 2001; U.S. Ser. No. 60/340,565, filed Dec. 14, 2001; U.S. Ser. No. 60/359,671, filed Feb. 26, 2002; U.S. Ser. No. 60/360,924, filed Feb. 28, 2002; U.S. Ser. No. 60/381,004, filed May 16, 2002; U.S. Ser. No. 60/401,315, filed Aug. 6, 2002; U.S. Ser. No. 60/340,608, filed Dec. 14, 2001; U.S. Ser. No. 60/405,687, filed Aug. 23, 2002; U.S. Ser. No. 60/340,440, filed Dec. 14, 2001; U.S. Ser. No. 60/361,028, filed Feb. 28, 2002; U.S. Ser. No. 60/341,144, filed Dec. 14, 2001; U.S. Ser. No. 60/359,599, filed Feb. 26, 2002; U.S. Ser. No. 60/393,332, filed Jul. 2, 2002; U.S. Ser. No. 60/341,346, filed Dec. 12, 2001; U.S. Ser. No. 60/341,477, filed Dec. 17, 2001; U.S. Ser. No. 60/381,495, filed May 17, 2002; U.S. Ser. No. 60/401,788, filed Aug. 7, 2002; U.S. Ser. No. 60/341,540, filed Dec. 17, 2001; U.S. Ser. No. 60/383,744, filed May 28, 2002; U.S. Ser. No. 60/342,592, filed Dec. 20, 2001; U.S. Ser. No. 60/340,390, filed Dec. 14, 2001; U.S. Ser. No. 60/344,903, filed Dec. 31, 2001; U.S. Ser. No. 60/384,024, filed May 29, 2002; U.S. Ser. No. 60/373,288, filed Apr. 17, 2002; U.S. Ser. No. 60/380,981, filed May 15, 2002; U.S. Ser. No. 60/406,353, filed Aug. 26, 2002; U.S. Ser. No. 60/422,756, filed Oct. 31, 2002; and U.S. Ser. No. 60/341,768, filed Dec. 18, 2001; and is a continuation-in-part of 10/188,186, filed Jul. 2, 2003, which claims the benefit of 60/303,046, filed Jul. 5, 2001; 60/360,814, filed Mar. 1, 2002; 60/303,828, filed Jul. 9, 2001; 60/323,380, filed Sep. 19, 2001; 60/361,133, filed Mar. 1, 2002; 60/304,016, filed Jul. 9, 2001; 60/304,502, filed Jul. 11, 2001; 60/305,262, filed Jul. 13, 2001; 60/373,881, filed Apr. 19, 2002; 60/305,673, filed Jul. 16, 2001; 60/323,969, filed Sep. 21, 2001; 60/372,326, filed Apr. 12, 2002; 60/361,677, filed Mar. 5, 2002; 60/345,022, filed Jan. 4, 2002; 60/363,637, filed Mar. 12, 2002; 60/373,921, filed Apr. 19, 2002; 60/307,536, filed Jul. 24, 2001; 60/360,830, filed Mar. 1, 2002; 60/306,085, filed Jul. 17, 2001; 60/308,228, filed Jul. 27, 2001; 60/372,990, filed Apr. 16, 2002; 60/361,147, filed Mar. 1, 2002; 60/308,877, filed Jul. 30, 2001; 60/345,038, filed Jan. 4, 2002; 60/361,172, filed Feb. 28, 2002; 60/313,328, filed Aug. 17, 2001; 60/318,711, filed Sep. 12, 2001; and 60/309,255, filed Aug. 1, 2001; and claims priority to U.S. Ser. No. 60/403,620, filed Aug. 15, 2002; U.S. Ser. No. 60/401,316, filed Aug. 6, 2002; U.S. Ser. No. 60/405,232, filed Aug. 22, 2002; U.S. Ser. No. 60/401,627, filed Aug. 6, 2002; U.S. Ser. No. 60/405,121, filed Aug. 22, 2002; U.S. Ser. No. 60/404,649, filed Aug. 20, 2002; U.S. Ser. No. 60/404,674, filed Aug. 20, 2002; U.S. Ser. No. 60/454,479, filed Mar. 13, 2003; U.S. Ser. No. 60/406,131, filed Aug. 27, 2002; U.S. Ser. No. 60/409,366, filed Sep. 9, 2002; U.S. Ser. No. 60/406,130, filed Aug. 27, 2002; U.S. Ser. No. 60/407,919, filed Sep. 3, 2002; each of which is incorporated herein by reference in its entirety.

### TECHNICAL FIELD

[0002] The present invention relates to novel polypeptides that are targets of small molecule drugs and that have properties related to stimulation of biochemical or physiological responses in a cell, a tissue, an organ or an organism. More particularly, the novel polypeptides are gene products of novel genes, or are specified biologically active fragments or derivatives thereof. Methods of use encompass screening, diagnostic, and prognostic assay procedures as well as methods of treating diverse pathological conditions.

### BACKGROUND

[0003] Obesity and diabetes are major public health concerns in the developed and developing world. It is estimated that over half of the adult US population is overweight.

### FIELD OF THE INVENTION

[0004] The present invention relates to novel polypeptides that are targets of small molecule drugs and that have properties related to stimulation of biochemical or physiological responses in a cell, a tissue, an organ or an organism. More particularly, the novel polypeptides are gene products of novel genes, or are specified biologically active fragments or derivatives thereof. Methods of use encompass screening, diagnostic and prognostic assay procedures as well as methods of treating diverse pathological conditions.

### BACKGROUND

[0005] Obesity and diabetes are major public health concerns in the developed and developing world. It is estimated that over half of the adult US population is overweight.

[0006] This includes those with a body mass index (BMI) greater than the upper limit of normal (25) where the BMI is defined as the weight (Kg)/[height (m)]². A common consequence of being overweight is hyperlipidemia and the development of insulin resistance. This is followed by the development of hyperglycemia, a hallmark of Type II diabetes. Left untreated, the hyperglycemia leads to microvascular disease and end organ damage that includes retinopathy, renal disease, cardiac disease, peripheral neuropathy and peripheral vascular compromise. Currently, over 16 million adults in the US are affected by Type II diabetes and the condition has now become rampant among school-age children as a consequence of the epidemic of obesity in that age group.

[0007] Diabetes mellitus is a disorder in which blood levels of glucose (a simple sugar) are abnormally high because the body doesn't release or respond to insulin adequately. Blood sugar (glucose) levels vary throughout the day, rising after a meal and returning to normal within 2 hours. Blood sugar levels are normally between 70 and 110 milligrams per deciliter (mg/dL) of blood in the morning after an overnight fast. They are usually lower than 120 to 140 mg/dL 2 hours after eating foods or drinking liquids containing sugar or other carbohydrates.

[0008] Insulin, a hormone released from the pancreas, is the primary substance responsible for maintaining appropriate blood sugar levels. Insulin allows glucose to be transported into cells so that they can produce energy or store glucose-derived enrgy until it's needed. The rise in blood sugar levels after eating or drinking stimulates the pancreas to produce insulin, preventing a greater rise in blood sugar levels and causing them to fall gradually. Because muscles use glucose for energy, blood sugar levels can also fall during physical activity.

[0009] Diabetes results when the body doesn't produce enough insulin to maintain normal blood sugar levels or when cells don't respond appropriately to insulin. In type II diabetes mellitus, the pancreas continues to manufacture insulin, sometimes even at higher than normal levels. However, the body develops resistance to its effects, resulting in a relative insulin deficiency.

[0010] The main goal of diabetes treatment is to keep blood sugar levels within the normal range as much as possible. Completely normal levels are difficult to maintain, but the more closely they can be kept within the normal range, the less likely that temporary or long-term complications will develop.

[0011] Therefore, a therapeutic that decreases insulin resistance and/or enhances insulin secretion would be beneficial in treatment of obesity and/or diabetes. Additionally, such a therapeutic would be beneficial in treatment of insulin resistance, a condition that often leads to the development of diabetes.

[0012] In order to treat diseases, pathologies and other abnormal states or conditions in which a mammalian organism has been diagnosed as being, or as being at risk for becoming, other than in a normal state or condition, it is important to identify new therapeutic agents.

[0013] Eukaryotic cells are characterized by biochemical and physiological processes which under normal conditions are exquisitely balanced to achieve the preservation and propagation of the cells. When such cells are components of multicellular organisms such as vertebrates, or more particularly organisms such as mammals, the regulation of the biochemical and physiological processes involves intricate signaling pathways. Frequently, such signaling pathways involve extracellular signaling proteins, cellular receptors that bind the signaling proteins and signal transducing components located within the cells.

[0014] Signaling proteins may be classified as endocrine effectors, paracrine effectors or autocrine effectors. Endocrine effectors are signaling molecules secreted by a given organ into the circulatory system, which are then transported to a distant target organ or tissue. The target cells include the receptors for the endocrine effector, and when the endocrine effector binds, a signaling cascade is induced. Paracrine effectors involve secreting cells and receptor cells in close proximity to each other, for example two different classes of cells in the same tissue or organ. One class of cells secretes the paracrine effector, which then reaches the second class of cells, for example by diffusion through the extracellular fluid. The second class of cells contains the receptors for the paracrine effector; binding of the effector results in induction of the signaling cascade that elicits the corresponding biochemical or physiological effect. Autocrine effectors are highly analogous to paracrine effectors, except that the same cell type that secretes the autocrine effector also contains the receptor. Thus the autocrine effector binds to receptors on the same cell, or on identical neighboring cells. The binding process then elicits the characteristic biochemical or physiological effect.

[0015] Signaling processes may elicit a variety of effects on cells and tissues including by way of nonlimiting example induction of cell or tissue proliferation, suppression of growth or proliferation, induction of differentiation or maturation of a cell or tissue, and suppression of differentiation or maturation of a cell or tissue.

[0016] Many pathological conditions involve dysregulation of expression of important effector proteins. In certain classes of pathologies the dysregulation is manifested as diminished or suppressed level of synthesis and secretion of protein effectors. In other classes of pathologies the dysregulation is manifested as increased or up-regulated level of synthesis and secretion of protein effectors. In a clinical setting a subject may be suspected of suffering from a condition brought on by altered or mis-regulated levels of a protein effector of interest. Therefore there is a need to assay for the level of the protein effector of interest in a biological sample from such a subject, and to compare the level with that characteristic of a nonpathological condition. There also is a need to provide the protein effector as a product of manufacture. Administration of the effector to a subject in need thereof is useful in treatment of the pathological condition. Accordingly, there is a need for a method of treatment of a pathological condition brought on by a diminished or suppressed levels of the protein effector of interest. In addition, there is a need for a method of treatment of a pathological condition brought on by a increased or up-regulated levels of the protein effector of interest.

[0017] Small molecule targets have been implicated in various disease states or pathologies. These targets may be proteins, and particularly enzymatic proteins, which are acted upon by small molecule drugs for the purpose of altering target function and achieving a desired result. Cellular, animal and clinical studies can be performed to elucidate the genetic contribution to the etiology and pathogenesis of conditions in which small molecule targets are implicated in a variety of physiologic, pharmacologic or native states. These studies utilize the core technologies at CuraGen Corporation to look at differential gene expression, protein-protein interactions, large-scale sequencing of expressed genes and the association of genetic variations such as, but not limited to, single nucleotide polymorphisms (SNPs) or splice variants in and between biological samples from experimental and control groups. The goal of such studies is to identify potential avenues for therapeutic intervention in order to prevent, treat the consequences or cure the conditions.

[0018] In order to treat diseases, pathologies and other abnormal states or conditions in which a mammalian organism has been diagnosed as being, or as being at risk for becoming, other than in a normal state or condition, it is important to identify new therapeutic agents. Such a procedure includes at least the steps of identifying a target component within an affected tissue or organ, and identifying a candidate therapeutic agent that modulates the functional attributes of the target. The target component may be any biological macromolecule implicated in the disease or pathology. Commonly the target is a polypeptide or protein with specific functional attributes. Other classes of macromolecule may be a nucleic acid, a polysaccharide, a lipid such as a complex lipid or a glycolipid; in addition a target may be a sub-cellular structure or extra-cellular structure that is comprised of more than one of these classes of macromolecule. Once such a target has been identified, it may be employed in a screening assay in order to identify favorable candidate therapeutic agents from among a large population of substances or compounds.

[0019] In many cases the objective of such screening assays is to identify small molecule candidates; this is commonly approached by the use of combinatorial methodologies to develop the population of substances to be tested. The implementation of high throughput screening methodologies is advantageous when working with large, combinatorial libraries of compounds.

### SUMMARY OF THE INVENTION

[0020] The invention includes nucleic acid sequences and the novel polypeptides they encode. The novel nucleic acids and polypeptides are referred to herein as NOVX, or NOV1, NOV2, NOV3, etc., nucleic acids and polypeptides. These nucleic acids and polypeptides, as well as derivatives, homologs, analogs and fragments thereof, will hereinafter be collectively designated as “NOVX” nucleic acid, which represents the nucleotide sequence selected from the group consisting of SEQ ID NO: 2n-1, wherein n is an integer between 1 and 85, or polypeptide sequences, which represents the group consisting of SEQ ID NO: 2n, wherein n is an integer between 1 and 85.

[0021] In one aspect, the invention provides an isolated polypeptide comprising a mature form of a NOVX amino acid. One example is a variant of a mature form of a NOVX amino acid sequence, wherein any amino acid in the mature form is changed to a different amino acid, provided that no more than 15% of the amino acid residues in the sequence of the mature form are so changed. The amino acid can be, for example, a NOVX amino acid sequence or a variant of a NOVX amino acid sequence, wherein any amino acid specified in the chosen sequence is changed to a different amino acid, provided that no more than 15% of the amino acid residues in the sequence are so changed. The invention also includes fragments of any of these. In another aspect, the invention also includes an isolated nucleic acid that encodes a NOVX polypeptide, or a fragment, homolog, analog or derivative thereof.

[0022] Also included in the invention is a NOVX polypeptide that is a naturally occurring allelic variant of a NOVX sequence. In one embodiment, the allelic variant includes an amino acid sequence that is the translation of a nucleic acid sequence differing by a single nucleotide from a NOVX nucleic acid sequence. In another embodiment, the NOVX polypeptide is a variant polypeptide described therein, wherein any amino acid specified in the chosen sequence is changed to provide a conservative substitution. In one embodiment, the invention discloses a method for determining the presence or amount of the NOVX polypeptide in a sample. The method involves the steps of: providing a sample; introducing the sample to an antibody that binds immunospecifically to the polypeptide; and determining the presence or amount of antibody bound to the NOVX polypeptide, thereby determining the presence or amount of the NOVX polypeptide in the sample. In another embodiment, the invention provides a method for determining the presence of or predisposition to a disease associated with altered levels of a NOVX polypeptide in a mammalian subject. This method involves the steps of: measuring the level of expression of the polypeptide in a sample from the first mammalian subject; and comparing the amount of the polypeptide in the sample of the first step to the amount of the polypeptide present in a control sample from a second mammalian subject known not to have, or not to be predisposed to, the disease, wherein an alteration in the expression level of the polypeptide in the first subject as compared to the control sample indicates the presence of or predisposition to the disease.

[0023] In a further embodiment, the invention includes a method of identifying an agent that modulates a NOVX polypeptide. This method involves the steps of: introducing the polypeptide to the agent; and determining whether the agent binds to the polypeptide. In various embodiments, the agent is a cellular receptor or a downstream effector.

[0024] In another aspect, the invention provides a method for identifying a potential therapeutic agent for use in treatment of a pathology, wherein the pathology is related to aberrant expression or aberrant physiological interactions of a NOVX polypeptide. The method involves the steps of: providing a cell expressing the NOVX polypeptide and having a property or function ascribable to the polypeptide; contacting the cell with a composition comprising a candidate substance; and determining whether the substance alters the property or function ascribable to the polypeptide; whereby, if an alteration observed in the presence of the substance is not observed when the cell is contacted with a composition devoid of the substance, the substance is identified as a potential therapeutic agent. In another aspect, the invention describes a method for screening for a modulator of activity or of latency or predisposition to a pathology associated with the NOVX polypeptide. This method involves the following steps: administering a test compound to a test animal at increased risk for a pathology associated with the NOVX polypeptide, wherein the test animal recombinantly expresses the NOVX polypeptide. This method involves the steps of measuring the activity of the NOVX polypeptide in the test animal after administering the compound of step; and comparing the activity of the protein in the test animal with the activity of the NOVX polypeptide in a control animal not administered the polypeptide, wherein a change in the activity of the NOVX polypeptide in the test animal relative to the control animal indicates that the test compound is a modulator of latency of, or predisposition to, a pathology associated with the NOVX polypeptide. In one embodiment, the test animal is a recombinant test animal that expresses a test protein transgene or expresses the transgene under the control of a promoter at an increased level relative to a wild-type test animal, and wherein the promoter is not the native gene promoter of the transgene. In another aspect, the invention includes a method for modulating the activity of the NOVX polypeptide, the method comprising introducing a cell sample expressing the NOVX polypeptide with a compound that binds to the polypeptide in an amount sufficient to modulate the activity of the polypeptide.

[0025] In order to treat diseases, pathologies and other abnormal states or conditions in which a mammalian organism has been diagnosed as being, or as being at risk for becoming, other than in a normal state or condition, it is important to identify new therapeutic agents. Such a procedure includes at least the steps of identifying a target component within an affected tissue or organ, and identifying a candidate therapeutic agent that modulates the functional attributes of the target. The target component may be any biological macromolecule implicated in the disease or pathology. Commonly the target is a polypeptide or protein with specific functional attributes. Other classes of macromolecule may be a nucleic acid, a polysaccharide, a lipid such as a complex lipid or a glycolipid; in addition a target may be a sub-cellular structure or extra-cellular structure that is comprised of more than one of these classes of macromolecule. Once such a target has been identified, it may be employed in a screening assay in order to identify favorable candidate therapeutic agents from among a large population of substances or compounds.

[0026] In many cases the purpose of such screening assays is to identify small molecule candidates; this is commonly approached by the use of combinatorial methodologies to develop the population of substances to be tested. The implementation of high throughput screening methodologies is advantageous when working with large, combinatorial libraries of compounds.

[0027] It is a purpose of this invention to provide cell lines that recombinantly or endogenously express the target biopolymer or an isolated target biopolymer that is intended to serve as the macromolecular component in a screening assay for identifying candidate pharmaceutical agents.

[0028] It is another purpose of the present invention to provide screening assays that positively identify candidate pharmaceutical agents from among a combinatorial library of low molecular weight substances or compounds.

[0029] It is still a further aspect of this invention to employ the candidate pharmaceutical agents in any of a variety of in vitro, ex vivo and in vivo assays in order to identify pharmaceutical agents with advantageous therapeutic applications in the treatment of a disease, pathology, or abnormal state or condition in a mammal.

[0030] In another aspect, the present invention provides a method of identifying a test compound as a candidate therapeutic agent, for treating a disease, pathology, or an abnormal state or condition using a target polypeptide (NOVX) having a specific association with the disease. This method includes:
[0031] (a) combining a test compound with a target polypeptide and a substrate of the target polypeptide; and
[0032] (b) determining whether the test compound modulates the activity of the target polypeptide.

[0033] In one embodiment of this method, the chemical compound is a member of a combinatorial library of compounds; the combining in step (a) is conducted on one or more replicate samples of the biopolymer; and the replicate sample is contacted with at least one member of the combinatorial library. In additional embodiments of this method, the biopolymer is included within a cell and is functionally expressed therein. In still a further embodiment, the binding of the compound modulates the function of the biopolymer, and it is the modulation that provides the identification that the compound is a potential therapeutic agent. In yet further embodiments of this method, the target biopolymer is a polypeptide.

[0034] As used herein, a “substrate” includes any compound capable of binding to or interacting with a target polypeptide, including but not limited to a peptide, a polypeptide, a nucleic acid, a carbohydrate moiety, a lipid, a small molecule (e.g., cyclic AMP, ATP), an agonist, an antagonist, and an inhibitor.

[0035] In another aspect of the invention, a method for identifying a pharmaceutical agent for treating a disease, pathology, or an abnormal state or condition is provided. The method includes the steps of:
[0036] (1) identifying a candidate therapeutic agent for treating said disease, pathology, or abnormal state or condition by the method described in the preceding paragraphs;
[0037] (2) contacting a biological sample associated with the disease, pathology, or abnormal state or condition with the candidate therapeutic agent;
[0038] (3) determining whether the candidate induces an effect on the biological sample associated with a therapeutic response therein; and
[0039] (4) identifying a candidate exerting such an effect as a pharmaceutical agent.

[0040] In significant embodiments of the method, the biological sample includes a cell, a tissue or organ, or is a nonhuman mammal.

[0041] Several cellular, animal and clinical studies were performed to elucidate the genetic contribution to the etiology and pathogenesis of these conditions in a variety of physiologic, pharmacologic or native states. These studies utilized the core technologies at CuraGen Corporation to look at differential gene expression, protein-protein interactions, large-scale sequencing of expressed genes and the association of genetic variations such as, but not limited to, single nucleotide polymorphisms (SNPs) or splice variants in and between biological samples from experimental and control groups. The goal of such studies is to identify various therapeutic interventions in order to prevent, treat the consequences or cure the conditions of obesity and/or diabetes.

[0042] The present invention discloses novel associations of proteins and polypeptides and the nucleic acids that encode them with various diseases or pathologies. The proteins and related proteins that are similar to them, are encoded by a cDNA and/or by genomic DNA. The proteins, polypeptides and their cognate nucleic acids were identified by the inventors in certain cases. Additionally, the current invention embodies the use of recombinantly expressed and/or endogenously expressed protein in various screens to identify therapeutic antibodies and/or therapeutic small molecules which modulate activity of the disclosed NOVX polypeptides.

[0043] The invention also includes an isolated nucleic acid that encodes a NOVX polypeptide, or a fragment, homolog, analog or derivative thereof. In a preferred embodiment, the nucleic acid molecule comprises the nucleotide sequence of a naturally occurring allelic nucleic acid variant. In another embodiment, the nucleic acid encodes a variant polypeptide, wherein the variant polypeptide has the polypeptide sequence of a naturally occurring polypeptide variant. In another embodiment, the nucleic acid molecule differs by a single nucleotide from a NOVX nucleic acid sequence. In one embodiment, the NOVX nucleic acid molecule hybridizes under stringent conditions to the nucleotide sequence selected from the group consisting of SEQ ID NO: 2n-1, wherein n is an integer between 1 and 85, or a complement of the nucleotide sequence. In another aspect, the invention provides a vector or a cell expressing a NOVX nucleotide sequence.

[0044] In one embodiment, the invention discloses a method for modulating the activity of a NOVX polypeptide. The method includes the steps of: introducing a cell sample expressing the NOVX polypeptide with a compound that binds to the polypeptide in an amount sufficient to modulate the activity of the polypeptide. In another embodiment, the invention includes an isolated NOVX nucleic acid molecule comprising a nucleic acid sequence encoding a polypeptide comprising a NOVX amino acid sequence or a variant of a mature form of the NOVX amino acid sequence, wherein any amino acid in the mature form of the chosen sequence is changed to a different amino acid, provided that no more than 15% of the amino acid residues in the sequence of the mature form are so changed. In another embodiment, the invention includes an amino acid sequence that is a variant of the NOVX amino acid sequence, in which any amino acid specified in the chosen sequence is changed to a different amino acid, provided that no more than 15% of the amino acid residues in the sequence are so changed.

[0045] In one embodiment, the invention discloses a NOVX nucleic acid fragment encoding at least a portion of a NOVX polypeptide or any variant of the polypeptide, wherein any amino acid of the chosen sequence is changed to a different amino acid, provided that no more than 10% of the amino acid residues in the sequence are so changed. In another embodiment, the invention includes the complement of any of the NOVX nucleic acid molecules or a naturally occurring allelic nucleic acid variant. In another embodiment, the invention discloses a NOVX nucleic acid molecule that encodes a variant polypeptide, wherein the variant polypeptide has the polypeptide sequence of a naturally occurring polypeptide variant. In another embodiment, the invention discloses a NOVX nucleic acid, wherein the nucleic acid molecule differs by a single nucleotide from a NOVX nucleic acid sequence.

[0046] In another aspect, the invention includes a NOVX nucleic acid, wherein one or more nucleotides in the NOVX nucleotide sequence is changed to a different nucleotide provided that no more than 15% of the nucleotides are so changed. In one embodiment, the invention discloses a nucleic acid fragment of the NOVX nucleotide sequence and a nucleic acid fragment wherein one or more nucleotides in the NOVX nucleotide sequence is changed from that selected from the group consisting of the chosen sequence to a different nucleotide provided that no more than 15% of the nucleotides are so changed. In another embodiment, the invention includes a nucleic acid molecule wherein the nucleic acid molecule hybridizes under stringent conditions to a NOVX nucleotide sequence or a complement of the NOVX nucleotide sequence. In one embodiment, the invention includes a nucleic acid molecule, wherein the sequence is changed such that no more than 15% of the nucleotides in the coding sequence differ from the NOVX nucleotide sequence or a fragment thereof.

[0047] In a further aspect, the invention includes a method for determining the presence or amount of the NOVX nucleic acid in a sample. The method involves the steps of: providing the sample; introducing the sample to a probe that binds to the nucleic acid molecule; and determining the presence or amount of the probe bound to the NOVX nucleic acid molecule, thereby determining the presence or amount of the NOVX nucleic acid molecule in the sample. In one embodiment, the presence or amount of the nucleic acid molecule is used as a marker for cell or tissue type.

[0048] In another aspect, the invention discloses a method for determining the presence of or predisposition to a disease associated with altered levels of the NOVX nucleic acid molecule of in a first mammalian subject. The method involves the steps of: measuring the amount of NOVX nucleic acid in a sample from the first mammalian subject; and comparing the amount of the nucleic acid in the sample of step (a) to the amount of NOVX nucleic acid present in a control sample from a second mammalian subject known not to have or not be predisposed to, the disease; wherein an alteration in the level of the nucleic acid in the first subject as compared to the control sample indicates the presence of or predisposition to the disease.

[0049] Unless otherwise defined, all technical and scientific terms used herein have the same meaning as commonly understood by one of ordinary skill in the art to which this invention belongs. Although methods and materials similar or equivalent to those described herein can be used in the practice or testing of the present invention, suitable methods and materials are described below.

[0050] All publications, patent applications, patents, and other references mentioned herein are incorporated by reference in their entirety. In the case of conflict, the present specification, including definitions, will control. In addition, the materials, methods, and examples are illustrative only and not intended to be limiting. Other features and advantages of the invention will be apparent from the following detailed description and claims.

### BRIEF DESCRIPTION OF THE FIGURES

[0051] FIG. 1 is a schematic diagram of the non-oxidative stage of the pentose phosphate pathway indicating the function of transketolase in the pathway.

[0052] FIG. 2 is a schematic diagram illustrating the roles of SREBP-regulated genes during excess citrate production.

[0053] FIG. 3 is a schematic diagram illustrating representative pathways relevant to the etiology and pathogenesis of obesity and/or diabetes.

[0054] FIG. 4 is a schematic diagram illustrating the pyruvate sythesis pathway.

### DETAILED DESCRIPTION OF THE INVENTION

[0055] The present invention provides novel nucleotides and polypeptides encoded thereby. Included in the invention are the novel nucleic acid sequences, their encoded polypeptides, antibodies, and other related compounds. The sequences are collectively referred to herein as “NOVX nucleic acids” or “NOVX polynucleotides” and the corresponding encoded polypeptides are referred to as “NOVX polypeptides” or “NOVX proteins.” Unless indicated otherwise, “NOVX” is meant to refer to any of the novel sequences disclosed herein. Table 1 provides a summary of the NOVX nucleic acids and their encoded polypeptides.

TABLE 1
Sequences and Corresponding SEQ ID Numbers

| | | SEQ ID | SEQ ID | |
|---|---|---|---|---|
| | | NO | NO | |
| NOVX | Internal | (nucleic | (amino | |
| Assignment | Identification | acid) | acid) | Homology |
| NOV1a | CG101190-01 | 1 | 2 | Phosphoenolpyruvate carboxykinase, |
| | | | | cytosolic [GTP] (EC 4.1.1.32) |
| | | | | (Phosphoenolpyruvate carboxylase) |
| | | | | (PEPCK-C) - Homo sapiens |
| NOV1b | 278992806 | 3 | 4 | Phosphoenolpyruvate carboxykinase, |
| | | | | cytosolic [GTP] (EC 4.1.1.32) |
| | | | | (Phosphoenolpyruvate carboxylase) |
| | | | | (PEPCK-C) - Homo sapiens |
| NOV1c | 278992862 | 5 | 6 | Phosphoenolpyruvate carboxykinase, |
| | | | | cytosolic [GTP] (EC 4.1.1.32) |
| | | | | (Phosphoenolpyruvate carboxylase) |
| | | | | (PEPCK-C) - Homo sapiens |
| NOV2a | CG175387-01 | 7 | 8 | Transketolase (EC 2.2.1.1) (TK) - Homo sapiens |
| NOV2b | CG175387-03 | 9 | 10 | Transketolase (EC 2.2.1.1) (TK) - Homo sapiens |
| NOV2c | 267254044 | 11 | 12 | Transketolase (EC 2.2.1.1) (TK) - Homo sapiens |
| NOV2d | CG175387-02 | 13 | 14 | Transketolase (EC 2.2.1.1) (TK) - Homo sapiens |
| NOV2e | CG175387-04 | 15 | 16 | Transketolase (EC 2.2.1.1) (TK) - Homo sapiens |
| NOV3a | CG180320-01 | 17 | 18 | Hypothetical protein FLJ23378 - Homo sapiens |
| NOV3b | CG180320-02 | 19 | 20 | Hypothetical protein FLJ23378 - Homo sapiens |
| NOV3c | CG180320-03 | 21 | 22 | Hypothetical protein FLJ23378 - Homo |
| | | | | sapiens |
| NOV3d | CG180320-04 | 23 | 24 | Hypothetical protein FLJ23378 - Homo sapiens |
| NOV3e | 305263028 | 25 | 26 | Hypothetical protein FLJ23378 - Homo sapiens |
| NOV3f | CG180320-05 | 27 | 28 | Hypothetical protein FLJ23378 - Homo sapiens |
| NOV4a | CG181387-01 | 29 | 30 | 3-ketoacyl-CoA thiolase, mitochondrial |
| | | | | (EC 2.3.1.16) (Beta-ketothiolase) |
| | | | | (Acetyl-CoA acyltransferase) |
| | | | | (Mitochondrial 3-oxoacyl-CoA thiolase) |
| | | | | (T1) - Homo sapiens |
| NOV4b | 282274427 | 31 | 32 | 3-ketoacyl-CoA thiolase, mitochondrial |
| | | | | (EC 2.3.1.16) (Beta-ketothiolase) |
| | | | | (Acetyl-CoA acyltransferase) |
| | | | | (Mitochondrial 3-oxoacyl-CoA thiolase) |
| | | | | (T1) - Homo sapiens |
| NOV4c | CG181387-02 | 33 | 34 | 3-ketoacyl-CoA thiolase, mitochondrial |
| | | | | (EC 2.3.1.16) (Beta-ketothiolase) |
| | | | | (Acetyl-CoA acyltransferase) |
| | | | | (Mitochondrial 3-oxoacyl-CoA thiolase) |
| | | | | (T1) - Homo sapiens |
| NOV4d | 306268235 | 35 | 36 | 3-ketoacyl-CoA thiolase, mitochondrial |
| | | | | (EC 2.3.1.16) (Beta-ketothiolase) |
| | | | | (Acetyl-CoA acyltransferase) |
| | | | | (Mitochondrial 3-oxoacyl-CoA thiolase) |
| | | | | (T1) - Homo sapiens |
| NOV4e | CG181387-03 | 37 | 38 | 3-ketoacyl-CoA thiolase, mitochondrial |
| | | | | (EC 2.3.1.16) (Beta-ketothiolase) |
| | | | | (Acetyl-CoA acyltransferase) |
| | | | | (Mitochondrial 3-oxoacyl-CoA thiolase) |
| | | | | (T1) - Homo sapiens |
| NOV4f | CG181387-04 | 39 | 40 | 3-ketoacyl-CoA thiolase, mitochondrial |
| | | | | (EC 2.3.1.16) (Beta-ketothiolase) |
| | | | | (Acetyl-CoA acyltransferase) |
| | | | | (Mitochondrial 3-oxoacyl-CoA thiolase) |
| | | | | (T1) - Homo sapiens |
| NOV4g | CG181387-05 | 41 | 42 | 3-ketoacyl-CoA thiolase, mitochondrial |
| | | | | (EC 2.3.1.16) (Beta-ketothiolase) |
| | | | | (Acetyl-CoA acyltransferase) |
| | | | | (Mitochondrial 3-oxoacyl-CoA thiolase) |
| | | | | (T1) - Homo sapiens |
| NOV4h | CG181387-06 | 43 | 44 | 3-ketoacyl-CoA thiolase, mitochondrial |
| | | | | (EC 2.3.1.16) (Beta-ketothiolase) |
| | | | | (Acetyl-CoA acyltransferase) |
| | | | | (Mitochondrial 3-oxoacyl-CoA thiolase) |
| | | | | (T1) - Homo sapiens |
| NOV5a | CG186640-02 | 45 | 46 | phosphoglycerate mutase (EC 5.4.2.1) M |
| NOV5b | 311980359 | 47 | 48 | phosphoglycerate mutase (EC 5.4.2.1) M |
| NOV5c | CG186640-01 | 49 | 50 | phosphoglycerate mutase (EC 5.4.2.1) M |
| NOV5d | CG186640-03 | 51 | 52 | phosphoglycerate mutase (EC 5.4.2.1) M |
| NOV5e | CG186640-04 | 53 | 54 | phosphoglycerate mutase (EC 5.4.2.1) M |
| NOV6a | CG58655-01 | 55 | 56 | Adenosine A1 receptor - Homo sapiens |
| NOV6b | 268368558 | 57 | 58 | Adenosine A1 receptor - Homo sapiens |
| NOV7a | CG96859-03 | 59 | 60 | Hydroxymethylglutaryl-CoA lyase, |
| | | | | mitochondrial precursor (EC 4.1.3.4) |
| | | | | (HMG-CoA lyase) (HL) (3-hydroxy-3- |
| | | | | methylglutarate-CoA lyase) - Homo sapiens |
| NOV7b | 223317153 | 61 | 62 | Hydroxymethylglutaryl-CoA lyase, |
| | | | | mitochondrial precursor (EC 4.1.3.4) |
| | | | | (HMG-CoA lyase) (HL) (3-hydroxy-3- |
| | | | | methylglutarate-CoA lyase) - Homo sapiens |
| NOV7c | CG96859-01 | 63 | 64 | Hydroxymethylglutaryl-CoA lyase, |
| | | | | mitochondrial precursor (EC 4.1.3.4) |
| | | | | (HMG-CoA lyase) (HL) (3-hydroxy-3- |
| | | | | methylglutarate-CoA lyase) - Homo sapiens |
| NOV7d | CG96859-02 | 65 | 66 | Hydroxymethylglutaryl-CoA lyase, |
| | | | | mitochondrial precursor (EC 4.1.3.4) |
| | | | | (HMG-CoA lyase) (HL) (3-hydroxy-3- |
| | | | | methylglutarate-CoA lyase) - Homo sapiens |
| NOV7e | CG96859-04 | 67 | 68 | Hydroxymethylglutaryl-CoA lyase, |
| | | | | mitochondrial precursor (EC 4.1.3.4) |
| | | | | (HMG-CoA lyase) (HL) (3-hydroxy-3- |
| | | | | methylglutarate-CoA lyase) - Homo sapiens |
| NOV7f | CG96859-05 | 69 | 70 | Hydroxymethylglutaryl-CoA lyase, |
| | | | | mitochondrial precursor (EC 4.1.3.4) |
| | | | | (HMG-CoA lyase) (HL) (3-hydroxy-3- |
| | | | | methylglutarate-CoA lyase) - Homo sapiens |
| NOV7g | CG96859-06 | 71 | 72 | Hydroxymethylglutaryl-CoA lyase, |
| | | | | mitochondrial precursor (EC 4.1.3.4) |
| | | | | (HMG-CoA lyase) (HL) (3-hydroxy-3- |
| | | | | methylglutarate-CoA lyase) - Homo sapiens |
| NOV7h | CG96859-07 | 73 | 74 | Hydroxymethylglutaryl-CoA lyase, |
| | | | | mitochondrial precursor (EC 4.1.3.4) |
| | | | | (HMG-CoA lyase) (HL) (3-hydroxy-3- |
| | | | | methylglutarate-CoA lyase) - Homo sapiens |
| NOV7i | CG96859-08 | 75 | 76 | Hydroxymethylglutaryl-CoA lyase, |
| | | | | mitochondrial precursor (EC 4.1.3.4) |
| | | | | (HMG-CoA lyase) (HL) (3-hydroxy-3- |
| | | | | methylglutarate-CoA lyase) - Homo sapiens |
| NOV7j | CG96859-09 | 77 | 78 | Hydroxymethylglutaryl-CoA lyase, |
| | | | | mitochondrial precursor (EC 4.1.3.4) |
| | | | | (HMG-CoA lyase) (HL) (3-hydroxy-3- |
| | | | | methylglutarate-CoA lyase) - Homo sapiens |

[0056] Table 1 indicates the homology of NOVX polypeptides to known protein families. Thus, the nucleic acids and polypeptides, antibodies and related compounds according to the invention corresponding to a NOVX as identified in column 1 of Table 1 will be useful in therapeutic and diagnostic applications implicated in, for example, pathologies and disorders associated with the known protein families identified in column 5 of Table 1.

[0057] Pathologies, diseases, disorders and condition and the like that are associated with NOVX sequences include, but are not limited to, e.g., cardiomyopathy, atherosclerosis, hypertension, congenital heart defects, aortic stenosis, atrial septal defect (ASD), atrioventricular (A-V) canal defect, ductus arteriosus, pulmonary stenosis, subaortic stenosis, ventricular septal defect (VSD), valve diseases, tuberous sclerosis, scleroderma, obesity, metabolic disturbances associated with obesity, transplantation, adrenoleukodystrophy, congenital adrenal hyperplasia, prostate cancer, diabetes, metabolic disorders, neoplasm; adenocarcinoma, lymphoma, uterus cancer, fertility, hemophilia, hypercoagulation, idiopathic thrombocytopenic purpura, immunodeficiencies, graft versus host disease, AIDS, bronchial asthma, Crohn's disease; multiple sclerosis, treatment of Albright Hereditary Ostoeodystrophy, infectious disease, anorexia, cancer-associated cachexia, cancer, neurodegenerative disorders, Alzheimer's Disease, Parkinson's Disorder, immune disorders, hematopoietic disorders, and the various dyslipidemias, the metabolic syndrome X and wasting disorders associated with chronic diseases and various cancers, as well as conditions such as transplantation and fertility.

[0058] NOVX nucleic acids and their encoded polypeptides are useful in a variety of applications and contexts. The various NOVX nucleic acids and polypeptides according to the invention are useful as novel members of the protein families according to the presence of domains and sequence relatedness to previously described proteins. Additionally, NOVX nucleic acids and polypeptides can also be used to identify proteins that are members of the family to which the NOVX polypeptides belong.

[0059] Consistent with other known members of the family of proteins, identified in column 5 of Table 1, the NOVX polypeptides of the present invention show homology to, and contain domains that are characteristic of, other members of such protein families. Details of the sequence relatedness and domain analysis for each NOVX are presented in Examples for identification of human sequence in individual sections for each NOVX polypeptide.

[0060] The NOVX nucleic acids and polypeptides can also be used to screen for molecules, which inhibit or enhance NOVX activity or function. Specifically, the nucleic acids and polypeptides according to the invention may be used as targets for the identification of small molecules that modulate or inhibit diseases associated with the protein families listed in Table 1.

[0061] The NOVX nucleic acids and polypeptides are also useful for detecting specific cell types. Details of the expression analysis for each NOVX are Examples showing expression profiles in individual sections for each NOVX polypeptide. Accordingly, the NOVX nucleic acids, polypeptides, antibodies and related compounds according to the invention will have diagnostic and therapeutic applications in the detection of a variety of diseases with differential expression in normal vs. diseased tissues, e.g., detection of a variety of cancers. SNP analysis for each NOVX, if applicable, is presented in SNP Examples in individual sections for each NOVX polypeptide.

[0062] Additional utilities for NOVX nucleic acids and polypeptides according to the invention are disclosed herein.

NOVX clones

[0063] NOVX nucleic acids and their encoded polypeptides are useful in a variety of applications and contexts. The various NOVX nucleic acids and polypeptides according to the invention are useful as novel members of the protein families according to the presence of domains and sequence relatedness to previously described proteins. Additionally, NOVX nucleic acids and polypeptides can also be used to identify proteins that are members of the family to which the NOVX polypeptides belong.

[0064] The NOVX genes and their corresponding encoded proteins are useful for preventing, treating or ameliorating medical conditions, e.g., by protein or gene therapy. Pathological conditions can be diagnosed by determining the amount of the new protein in a sample or by determining the presence of mutations in the new genes. Specific uses are described for each of the NOVX genes, based on the tissues in which they are most highly expressed. Uses include developing products for the diagnosis or treatment of a variety of diseases and disorders.

[0065] The NOVX nucleic acids and proteins of the invention are useful in potential diagnostic and therapeutic applications and as a research tool. These include serving as a specific or selective nucleic acid or protein diagnostic and/or prognostic marker, wherein the presence or amount of the nucleic acid or the protein are to be assessed, as well as potential therapeutic applications such as the following: (i) a protein therapeutic, (ii) a small molecule drug target, (iii) an antibody target (therapeutic, diagnostic, drug targeting/cytotoxic antibody), (iv) a nucleic acid useful in gene therapy (gene delivery/gene ablation), and (v) a composition promoting tissue regeneration in vitro and in vivo (vi) a biological defense weapon.

[0066] In one specific embodiment, the invention includes an isolated polypeptide comprising an amino acid sequence selected from the group consisting of: (a) a mature form of the amino acid sequence selected from the group consisting of SEQ ID NO: 2n, wherein n is an integer between 1 and 85; (b) a variant of a mature form of the amino acid sequence selected from the group consisting of SEQ ID NO: 2n, wherein n is an integer between 1 and 85, wherein any amino acid in the mature form is changed to a different amino acid, provided that no more than 15% of the amino acid residues in the sequence of the mature form are so changed; (c) an amino acid sequence selected from the group consisting of SEQ ID NO: 2n, wherein n is an integer between 1 and 85; (d) a variant of the amino acid sequence selected from the group consisting of SEQ ID NO:2n, wherein n is an integer between 1 and 85 wherein any amino acid specified in the chosen sequence is changed to a different amino acid, provided that no more than 15% of the amino acid residues in the sequence are so changed; and (e) a fragment of any of (a) through (d).

[0067] In another specific embodiment, the invention includes an isolated nucleic acid molecule comprising a nucleic acid sequence encoding a polypeptide comprising an amino acid sequence selected from the group consisting of: (a) a mature form of the amino acid sequence given SEQ ID NO: 2n, wherein n is an integer between 1 and 85; (b) a variant of a mature form of the amino acid sequence selected from the group consisting of SEQ ID NO: 2n, wherein n is an integer between 1 and 85 wherein any amino acid in the mature form of the chosen sequence is changed to a different amino acid, provided that no more than 15% of the amino acid residues in the sequence of the mature form are so changed; (c) the amino acid sequence selected from the group consisting of SEQ ID NO: 2n, wherein n is an integer between 1 and 85; (d) a variant of the amino acid sequence selected from the group consisting of SEQ ID NO: 2n, wherein n is an integer between 1 and 85, in which any amino acid specified in the chosen sequence is changed to a different amino acid, provided that no more than 15% of the amino acid residues in the sequence are so changed; (e) a nucleic acid fragment encoding at least a portion of a polypeptide comprising the amino acid sequence selected from the group consisting of SEQ ID NO: 2n, wherein n is an integer between 1 and 85 or any variant of said polypeptide wherein any amino acid of the chosen sequence is changed to a different amino acid, provided that no more than 10% of the amino acid residues in the sequence are so changed; and (f) the complement of any of said nucleic acid molecules.

[0068] In yet another specific embodiment, the invention includes an isolated nucleic acid molecule, wherein said nucleic acid molecule comprises a nucleotide sequence selected from the group consisting of: (a) the nucleotide sequence selected from the group consisting of SEQ ID NO: 2n-1, wherein n is an integer between 1 and 85; (b) a nucleotide sequence wherein one or more nucleotides in the nucleotide sequence selected from the group consisting of SEQ ID NO: 2n-1, wherein n is an integer between 1 and 85 is changed from that selected from the group consisting of the chosen sequence to a different nucleotide provided that no more than 15% of the nucleotides are so changed; (c) a nucleic acid fragment of the sequence selected from the group consisting of SEQ ID NO: 2n-1, wherein n is an integer between 1 and 85; and (d) a nucleic acid fragment wherein one or more nucleotides in the nucleotide sequence selected from the group consisting of SEQ ID NO: 2n-1, wherein n is an integer between 1 and 85 is changed from that selected from the group consisting of the chosen sequence to a different nucleotide provided that no more than 15% of the nucleotides are so changed.

NOVX Nucleic Acids and Polypeptides

[0069] One aspect of the invention pertains to isolated nucleic acid molecules that encode NOVX polypeptides or biologically active portions thereof. Also included in the invention are nucleic acid fragments sufficient for use as hybridization probes to identify NOVX-encoding nucleic acids (e.g., NOVX mRNAs) and fragments for use as PCR primers for the amplification and/or mutation of NOVX nucleic acid molecules. As used herein, the term “nucleic acid molecule” is intended to include DNA molecules (e.g., cDNA or genomic DNA), RNA molecules (e.g., mRNA), analogs of the DNA or RNA generated using nucleotide analogs, and derivatives, fragments and homologs thereof. The nucleic acid molecule may be single-stranded or double-stranded, but preferably is comprised double-stranded DNA.

[0070] A NOVX nucleic acid can encode a mature NOVX polypeptide. As used herein, a “mature” form of a polypeptide or protein disclosed in the present invention is the product of a naturally occurring polypeptide or precursor form or proprotein. The naturally occurring polypeptide, precursor or proprotein includes, by way of nonlimiting example, the full-length gene product encoded by the corresponding gene. Alternatively, it may be defined as the polypeptide, precursor or proprotein encoded by an ORF described herein. The product “mature” form arises, by way of nonlimiting example, as a result of one or more naturally occurring processing steps that may take place within the cell (e.g., host cell) in which the gene product arises. Examples of such processing steps leading to a “mature” form of a polypeptide or protein include the cleavage of the N-terminal methionine residue encoded by the initiation codon of an ORF, or the proteolytic cleavage of a signal peptide or leader sequence. Thus a mature form arising from a precursor polypeptide or protein that has residues 1 to N, where residue 1 is the N-terminal methionine, would have residues 2 through N remaining after removal of the N-terminal methionine. Alternatively, a mature form arising from a precursor polypeptide or protein having residues 1 to N, in which an N-terminal signal sequence from residue 1 to residue M is cleaved, would have the residues from residue M+1 to residue N remaining. Further as used herein, a “mature” form of a polypeptide or protein may arise from a step of post-translational modification other than a proteolytic cleavage event. Such additional processes include, by way of non-limiting example, glycosylation, myristylation or phosphorylation. In general, a mature polypeptide or protein may result from the operation of only one of these processes, or a combination of any of them.

[0071] The term “probe”, as utilized herein, refers to nucleic acid sequences of variable length, preferably between at least about 10 nucleotides (nt), about 100 nt, or as many as approximately, e.g., 6,000 nt, depending upon the specific use. Probes are used in the detection of identical, similar, or complementary nucleic acid sequences. Longer length probes are generally obtained from a natural or recombinant source, are highly specific, and much slower to hybridize than shorter-length oligomer probes. Probes may be single-stranded or double-stranded and designed to have specificity in PCR, membrane-based hybridization technologies, or ELISA-like technologies.

[0072] The term “isolated” nucleic acid molecule, as used herein, is a nucleic acid that is separated from other nucleic acid molecules which are present in the natural source of the nucleic acid. Preferably, an “isolated” nucleic acid is free of sequences which naturally flank the nucleic acid (i.e., sequences located at the 5′- and 3′-termini of the nucleic acid) in the genomic DNA of the organism from which the nucleic acid is derived. For example, in various embodiments, the isolated NOVX nucleic acid molecules can contain less than about 5 kb, 4 kb, 3 kb, 2 kb, 1 kb, 0.5 kb or 0.1 kb of nucleotide sequences which naturally flank the nucleic acid molecule in genomic DNA of the cell/tissue from which the nucleic acid is derived (e.g., brain, heart, liver, spleen, etc.). Moreover, an “isolated” nucleic acid molecule, such as a cDNA molecule, can be substantially free of other cellular material, or culture medium, or of chemical precursors or other chemicals.

[0073] A nucleic acid molecule of the invention, e.g., a nucleic acid molecule having the nucleotide sequence of SEQ ID NO:2n-1, wherein n is an integer between 1 and 85, or a complement of this nucleotide sequence, can be isolated using standard molecular biology techniques and the sequence information provided herein. Using all or a portion of the nucleic acid sequence of SEQ ID NO:2n-1, wherein n is an integer between 1 and 85, as a hybridization probe, NOVX molecules can be isolated using standard hybridization and cloning techniques (e.g., as described in Sambrook, et al., (eds.), MOLECULAR CLONING: A LABORATORY MANUAL 2^{nd} Ed., Cold Spring Harbor Laboratory Press, Cold Spring Harbor, N.Y., 1989; and Ausubel, et al., (eds.), CURRENT PROTOCOLS IN MOLECULAR BIOLOGY, John Wiley & Sons, New York, N.Y., 1993.)

[0074] A nucleic acid of the invention can be amplified using cDNA, mRNA or alternatively, genomic DNA, as a template with appropriate oligonucleotide primers according to standard PCR amplification techniques. The nucleic acid so amplified can be cloned into an appropriate vector and characterized by DNA sequence analysis. Furthermore, oligonucleotides corresponding to NOVX nucleotide sequences can be prepared by standard synthetic techniques, e.g., using an automated DNA synthesizer.

[0075] As used herein, the term “oligonucleotide” refers to a series of linked nucleotide residues. A short oligonucleotide sequence may be based on, or designed from, a genomic or cDNA sequence and is used to amplify, confirm, or reveal the presence of an identical, similar or complementary DNA or RNA in a particular cell or tissue. Oligonucleotides comprise a nucleic acid sequence having about 10 nt, 50 nt, or 100 nt in length, preferably about 15 nt to 30 nt in length. In one embodiment of the invention, an oligonucleotide comprising a nucleic acid molecule less than 100 nt in length would further comprise at least 6 contiguous nucleotides of SEQ ID NO:2n-1, wherein n is an integer between 1 and 85, or a complement thereof. Oligonucleotides may be chemically synthesized and may also be used as probes. In another embodiment, an isolated nucleic acid molecule of the invention comprises a nucleic acid molecule that is a complement of the nucleotide sequence shown in SEQ ID NO:2n-1, wherein n is an integer between 1 and 85, or a portion of this nucleotide sequence (e.g., a fragment that can be used as a probe or primer or a fragment encoding a biologically-active portion of a NOVX polypeptide). A nucleic acid molecule that is complementary to the nucleotide sequence of SEQ ID NO:2n-1, wherein n is an integer between 1 and 85, is one that is sufficiently complementary to the nucleotide sequence of SEQ ID NO:2n-1, wherein n is an integer between 1 and 85, that it can hydrogen bond with few or no mismatches to the nucleotide sequence shown in SEQ ID NO:2n-1, wherein n is an integer between 1 and 85, thereby forming a stable duplex.

[0076] As used herein, the term “complementary” refers to Watson-Crick or Hoogsteen base pairing between nucleotides units of a nucleic acid molecule, and the term “binding” means the physical or chemical interaction between two polypeptides or compounds or associated polypeptides or compounds or combinations thereof. Binding includes ionic, non-ionic, van der Waals, hydrophobic interactions, and the like. A physical interaction can be either direct or indirect. Indirect interactions may be through or due to the effects of another polypeptide or compound. Direct binding refers to interactions that do not take place through, or due to, the effect of another polypeptide or compound, but instead are without other substantial chemical intermediates.

[0077] A “fragment” provided herein is defined as a sequence of at least 6 (contiguous) nucleic acids or at least 4 (contiguous) amino acids, a length sufficient to allow for specific hybridization in the case of nucleic acids or for specific recognition of an epitope in the case of amino acids, and is at most some portion less than a full length sequence. Fragments may be derived from any contiguous portion of a nucleic acid or amino acid sequence of choice. A full-length NOVX clone is identified as containing an ATG translation start codon and an in-frame stop codon. Any disclosed NOVX nucleotide sequence lacking an ATG start codon therefore encodes a truncated C-terminal fragment of the respective NOVX polypeptide, and requires that the corresponding full-length cDNA extend in the 5′ direction of the disclosed sequence. Any disclosed NOVX nucleotide sequence lacking an in-frame stop codon similarly encodes a truncated N-terminal fragment of the respective NOVX polypeptide, and requires that the corresponding full-length cDNA extend in the 3′ direction of the disclosed sequence.

[0078] A “derivative” is a nucleic acid sequence or amino acid sequence formed from the native compounds either directly, by modification or partial substitution. An “analog” is a nucleic acid sequence or amino acid sequence that has a structure similar to, but not identical to, the native compound, e.g., they differs from it in respect to certain components or side chains. Analogs may be synthetic or derived from a different evolutionary origin and may have a similar or opposite metabolic activity compared to wild type. A “homolog” is a nucleic acid sequence or amino acid sequence of a particular gene that is derived from different species. Derivatives and analogs may be full length or other than full length. Derivatives or analogs of the nucleic acids or proteins of the invention include, but are not limited to, molecules comprising regions that are substantially homologous to the nucleic acids or proteins of the invention, in various embodiments, by at least about 70%, 80%, or 95% identity (with a preferred identity of 80-95%) over a nucleic acid or amino acid sequence of identical size or when compared to an aligned sequence in which the alignment is done by a computer homology program known in the art, or whose encoding nucleic acid is capable of hybridizing to the complement of a sequence encoding the proteins under stringent, moderately stringent, or low stringent conditions. See e.g., Ausubel, et al., CURRENT PROTOCOLS IN MOLECULAR BIOLOGY, John Wiley & Sons, New York, N.Y., 1993, and below. A “homologous nucleic acid sequence” or “homologous amino acid sequence,” or variations thereof, refer to sequences characterized by a homology at the nucleotide level or amino acid level as discussed above. Homologous nucleotide sequences include those sequences coding for isoforms of NOVX polypeptides. Isoforms can be expressed in different tissues of the same organism as a result of, for example, alternative splicing of RNA. Alternatively, isoforms can be encoded by different genes. In the invention, homologous nucleotide sequences include nucleotide sequences encoding for a NOVX polypeptide of species other than humans, including, but not limited to: vertebrates, and thus can include, e.g., frog, mouse, rat, rabbit, dog, cat cow, horse, and other organisms. Homologous nucleotide sequences also include, but are not limited to, naturally occurring allelic variations and mutations of the nucleotide sequences set forth herein. A homologous nucleotide sequence does not, however, include the exact nucleotide sequence encoding human NOVX protein. Homologous nucleic acid sequences include those nucleic acid sequences that encode conservative amino acid substitutions (see below) in SEQ ID NO:2n-1, wherein n is an integer between 1 and 85, as well as a polypeptide possessing NOVX biological activity. Various biological activities of the NOVX proteins are described below. A NOVX polypeptide is encoded by the open reading frame (“ORF”) of a NOVX nucleic acid. An ORF corresponds to a nucleotide sequence that could potentially be translated into a polypeptide. A stretch of nucleic acids comprising an ORF is uninterrupted by a stop codon. An ORF that represents the coding sequence for a full protein begins with an ATG “start” codon and terminates with one of the three “stop” codons, namely, TAA, TAG, or TGA. For the purposes of this invention, an ORF may be any part of a coding sequence, with or without a start codon, a stop codon, or both. For an ORF to be considered as a good candidate for coding for a bonafide cellular protein, a minimum size requirement is often set, e.g., a stretch of DNA that would encode a protein of 50 amino acids or more. The nucleotide sequences determined from the cloning of the human NOVX genes allows for the generation of probes and primers designed for use in identifying and/or cloning NOVX homologues in other cell types, e.g., from other tissues, as well as NOVX homologues from other vertebrates. The probe/primer typically comprises substantially purified oligonucleotide. The oligonucleotide typically comprises a region of nucleotide sequence that hybridizes under stringent conditions to at least about 12, 25, 50, 100, 150, 200, 250, 300, 350 or 400 consecutive sense strand nucleotide sequence of SEQ ID NO:2n-1, wherein n is an integer between 1 and 85; or an anti-sense strand nucleotide sequence of SEQ ID NO:2n-1, wherein n is an integer between 1 and 85; or of a naturally occurring mutant of SEQ ID NO:2n-1, wherein n is an integer between 1 and 85.

[0079] Probes based on the human NOVX nucleotide sequences can be used to detect transcripts or genomic sequences encoding the same or homologous proteins. In various embodiments, the probe has a detectable label attached, e.g., the label can be a radioisotope, a fluorescent compound, an enzyme, or an enzyme co-factor. Such probes can be used as a part of a diagnostic test kit for identifying cells or tissues which mis-express a NOVX protein, such as by measuring a level of a NOVX-encoding nucleic acid in a sample of cells from a subject e.g., detecting NOVX mRNA levels or determining whether a genomic NOVX gene has been mutated or deleted.

[0080] “A polypeptide having a biologically-active portion of a NOVX polypeptide” refers to polypeptides exhibiting activity similar, but not necessarily identical to, an activity of a polypeptide of the invention, including mature forms, as measured in a particular biological assay, with or without dose dependency. A nucleic acid fragment encoding a “biologically-active portion of NOVX” can be prepared by isolating a portion of SEQ ID NO:2n-1, wherein n is an integer between 1 and 85, that encodes a polypeptide having a NOVX biological activity (the biological activities of the NOVX proteins are described below), expressing the encoded portion of NOVX protein (e.g., by recombinant expression in vitro) and assessing the activity of the encoded portion of NOVX.

NOVX Nucleic Acid and Polypeptide Variants

[0081] The invention further encompasses nucleic acid molecules that differ from the nucleotide sequences of SEQ ID NO:2n-1, wherein n is an integer between 1 and 85, due to degeneracy of the genetic code and thus encode the same NOVX proteins as that encoded by the nucleotide sequences of SEQ ID NO:2n-1, wherein n is an integer between 1 and 85. In another embodiment, an isolated nucleic acid molecule of the invention has a nucleotide sequence encoding a protein having an amino acid sequence of SEQ ID NO:2n, wherein n is an integer between 1 and 85.

[0082] In addition to the human NOVX nucleotide sequences of SEQ ID NO:2n-1, wherein n is an integer between 1 and 85, it will be appreciated by those skilled in the art that DNA sequence polymorphisms that lead to changes in the amino acid sequences of the NOVX polypeptides may exist within a population (e.g., the human population). Such genetic polymorphism in the NOVX genes may exist among individuals within a population due to natural allelic variation. As used herein, the terms “gene” and “recombinant gene” refer to nucleic acid molecules comprising an open reading frame (ORF) encoding a NOVX protein, preferably a vertebrate NOVX protein. Such natural allelic variations can typically result in 1-5% variance in the nucleotide sequence of the NOVX genes. Any and all such nucleotide variations and resulting amino acid polymorphisms in the NOVX polypeptides, which are the result of natural allelic variation and that do not alter the functional activity of the NOVX polypeptides, are intended to be within the scope of the invention.

[0083] Moreover, nucleic acid molecules encoding NOVX proteins from other species, and thus that have a nucleotide sequence that differs from a human SEQ ID NO:2n-1, wherein n is an integer between 1 and 85, are intended to be within the scope of the invention. Nucleic acid molecules corresponding to natural allelic variants and homologues of the NOVX cDNAs of the invention can be isolated based on their homology to the human NOVX nucleic acids disclosed herein using the human cDNAs, or a portion thereof, as a hybridization probe according to standard hybridization techniques under stringent hybridization conditions. Accordingly, in another embodiment, an isolated nucleic acid molecule of the invention is at least 6 nucleotides in length and hybridizes under stringent conditions to the nucleic acid molecule comprising the nucleotide sequence of SEQ ID NO:2n-1, wherein n is an integer between 1 and 85. In another embodiment, the nucleic acid is at least 10, 25, 50, 100, 250, 500, 750, 1000, 1500, or 2000 or more nucleotides in length. In yet another embodiment, an isolated nucleic acid molecule of the invention hybridizes to the coding region. As used herein, the term “hybridizes under stringent conditions” is intended to describe conditions for hybridization and washing under which nucleotide sequences at least about 65% homologous to each other typically remain hybridized to each other.

[0084] Homologs (i.e., nucleic acids encoding NOVX proteins derived from species other than human) or other related sequences (e.g., paralogs) can be obtained by low, moderate or high stringency hybridization with all or a portion of the particular human sequence as a probe using methods well known in the art for nucleic acid hybridization and cloning.

[0085] As used herein, the phrase “stringent hybridization conditions” refers to conditions under which a probe, primer or oligonucleotide will hybridize to its target sequence, but to no other sequences. Stringent conditions are sequence-dependent and will be different in different circumstances. Longer sequences hybridize specifically at higher temperatures than shorter sequences. Generally, stringent conditions are selected to be about 5° C. lower than the thermal melting point (Tm) for the specific sequence at a defined ionic strength and pH. The Tm is the temperature (under defined ionic strength, pH and nucleic acid concentration) at which 50% of the probes complementary to the target sequence hybridize to the target sequence at equilibrium. Since the target sequences are generally present at excess, at Tm, 50% of the probes are occupied at equilibrium. Typically, stringent conditions will be those in which the salt concentration is less than about 1.0 M sodium ion, typically about 0.01 to 1.0 M sodium ion (or other salts) at pH 7.0 to 8.3 and the temperature is at least about 30° C. for short probes, primers or oligonucleotides (e.g., 10 nt to 50 nt) and at least about 60° C. for longer probes, primers and oligonucleotides. Stringent conditions may also be achieved with the addition of destabilizing agents, such as formamide.

[0086] Stringent conditions are known to those skilled in the art and can be found in Ausubel, et al., (eds.), CURRENT PROTOCOLS IN MOLECULAR BIOLOGY, John Wiley & Sons, N.Y. (1989), 6.3.1-6.3.6. Preferably, the conditions are such that sequences at least about 65%, 70%, 75%, 85%, 90%, 95%, 98%, or 99% homologous to each other typically remain hybridized to each other. A non-limiting example of stringent hybridization conditions are hybridization in a high salt buffer comprising 6×SSC, 50 mM Tris-HCl (pH 7.5), 1 mM EDTA, 0.02% PVP, 0.02% Ficoll, 0.02% BSA, and 500 mg/ml denatured salmon sperm DNA at 65° C., followed by one or more washes in 0.2×SSC, 0.01% BSA at 50° C. An isolated nucleic acid molecule of the invention that hybridizes under stringent conditions to a sequence of SEQ ID NO:2n-1, wherein n is an integer between 1 and 85, corresponds to a naturally-occurring nucleic acid molecule. As used herein, a “naturally-occurring” nucleic acid molecule refers to an RNA or DNA molecule having a nucleotide sequence that occurs in nature (e.g., encodes a natural protein).

[0087] In a second embodiment, a nucleic acid sequence that is hybridizable to the nucleic acid molecule comprising the nucleotide sequence of SEQ ID NO:2n-1, wherein n is an integer between 1 and 85, or fragments, analogs or derivatives thereof, under conditions of moderate stringency is provided. A non-limiting example of moderate stringency hybridization conditions are hybridization in 6×SSC, 5× Reinhardt's solution, 0.5% SDS and 100 mg/ml denatured salmon sperm DNA at 55° C., followed by one or more washes in 1×SSC, 0.1% SDS at 37° C. Other conditions of moderate stringency that may be used are well-known within the art. See, e.g., Ausubel, et al. (eds.), 1993, CURRENT PROTOCOLS IN MOLECULAR BIOLOGY, John Wiley & Sons, NY, and Krieger, 1990; GENE TRANSFER AND EXPRESSION, A LABORATORY MANUAL, Stockton Press, NY.

[0088] In a third embodiment, a nucleic acid that is hybridizable to the nucleic acid molecule comprising the nucleotide sequences of SEQ ID NO:2n-1, wherein n is an integer between 1 and 85, or fragments, analogs or derivatives thereof, under conditions of low stringency, is provided. A non-limiting example of low stringency hybridization conditions are hybridization in 35% formamide, 5×SSC, 50 mM Tris-HCl (pH 7.5), 5 mM EDTA, 0.02% PVP, 0.02% Ficoll, 0.2% BSA, 100 mg/ml denatured salmon sperm DNA, 10% (wt/vol) dextran sulfate at 40° C., followed by one or more washes in 2×SSC, 25 mM Tris-HCl (pH 7.4), 5 mM EDTA, and 0.1% SDS at 50° C. Other conditions of low stringency that may be used are well known in the art (e.g., as employed for cross-species hybridizations). See, e.g., Ausubel, et al. (eds.), 1993, CURRENT PROTOCOLS IN MOLECULAR BIOLOGY, John Wiley & Sons, NY, and Kriegler, 1990, GENE TRANSFER AND EXPRESSION, A LABORATORY MANUAL, Stockton Press, NY; Shilo and Weinberg, 1981. Proc Natl Acad Sci USA 78: 6789-6792.

Conservative Mutations

[0089] In addition to naturally-occurring allelic variants of NOVX sequences that may exist in the population, the skilled artisan will further appreciate that changes can be introduced by mutation into the nucleotide sequences of SEQ ID NO:2n-1, wherein n is an integer between 1 and 85, thereby leading to changes in the amino acid sequences of the encoded NOVX protein, without altering the functional ability of that NOVX protein. For example, nucleotide substitutions leading to amino acid substitutions at “non-essential” amino acid residues can be made in the sequence of SEQ ID NO:2n, wherein n is an integer between 1 and 85. A “non-essential” amino acid residue is a residue that can be altered from the wild-type sequences of the NOVX proteins without altering their biological activity, whereas an “essential” amino acid residue is required for such biological activity. For example, amino acid residues that are conserved among the NOVX proteins of the invention are not particularly amenable to alteration. Amino acids for which conservative substitutions can be made are well-known within the art.

[0090] Another aspect of the invention pertains to nucleic acid molecules encoding NOVX proteins that contain changes in amino acid residues that are not essential for activity. Such NOVX proteins differ in amino acid sequence from SEQ ID NO:2n-1, wherein n is an integer between 1 and 85, yet retain biological activity. In one embodiment, the isolated nucleic acid molecule comprises a nucleotide sequence encoding a protein, wherein the protein comprises an amino acid sequence at least about 40% homologous to the amino acid sequences of SEQ ID NO:2n, wherein n is an integer between 1 and 85. Preferably, the protein encoded by the nucleic acid molecule is at least about 60% homologous to SEQ ID NO:2n, wherein n is an integer between 1 and 85; more preferably at least about 70% homologous to SEQ ID NO:2n, wherein n is an integer between 1 and 85; still more preferably at least about 80% homologous to SEQ ID NO:2n, wherein n is an integer between 1 and 85; even more preferably at least about 90% homologous to SEQ ID NO:2n, wherein n is an integer between 1 and 85; and most preferably at least about 95% homologous to SEQ ID NO:2n, wherein n is an integer between 1 and 85.

[0091] An isolated nucleic acid molecule encoding a NOVX protein homologous to the protein of SEQ ID NO:2n, wherein n is an integer between 1 and 85, can be created by introducing one or more nucleotide substitutions, additions or deletions into the nucleotide sequence of SEQ ID NO:2n-1, wherein n is an integer between 1 and 85, such that one or more amino acid substitutions, additions or deletions are introduced into the encoded protein.

[0092] Mutations can be introduced any one of SEQ ID NO:2n-1, wherein n is an integer between 1 and 85, by standard techniques, such as site-directed mutagenesis and PCR-mediated mutagenesis. Preferably, conservative amino acid substitutions are made at one or more non-essential amino acid residues. A “conservative amino acid substitution” is one in which the amino acid residue is replaced with an amino acid residue having a similar side chain. Families of amino acid residues having similar side chains have been defined within the art. These families include amino acids with basic side chains (e.g., lysine, arginine, histidine), acidic side chains (e.g., aspartic acid, glutamic acid), uncharged polar side chains (e.g., glycine, asparagine, glutamine, serine, threonine, tyrosine, cysteine), nonpolar side chains (e.g., alanine, valine, leucine, isoleucine, proline, phenylalanine, methionine, tryptophan), beta-branched side chains (e.g., threonine, valine, isoleucine) and aromatic side chains (e.g., tyrosine, phenylalanine, tryptophan, histidine). Thus, a non-essential amino acid residue in the NOVX protein is replaced with another amino acid residue from the same side chain family. Alternatively, in another embodiment, mutations can be introduced randomly along all or part of a NOVX coding sequence, such as by saturation mutagenesis, and the resultant mutants can be screened for NOVX biological activity to identify mutants that retain activity. Following mutagenesis of a nucleic acid of SEQ ID NO:2n-1, wherein n is an integer between 1 and 85, the encoded protein can be expressed by any recombinant technology known in the art and the activity of the protein can be determined.

[0093] The relatedness of amino acid families may also be determined based on side chain interactions. Substituted amino acids may be fully conserved “strong” residues or fully conserved “weak” residues. The “strong” group of conserved amino acid residues may be any one of the following groups: STA, NEQK, NHQK, NDEQ, QHRK, MILV, MILF, HY, FYW, wherein the single letter amino acid codes are grouped by those amino acids that may be substituted for each other. Likewise, the “weak” group of conserved residues may be any one of the following: CSA, ATV, SAG, STNK, STPA, SGND, SNDEQK, NDEQHK, NEQHRK, HFY, wherein the letters within each group represent the single letter amino acid code.

[0094] In one embodiment, a mutant NOVX protein can be assayed for (i) the ability to form protein:protein interactions with other NOVX proteins, other cell-surface proteins, or biologically-active portions thereof, (ii) complex formation between a mutant NOVX protein and a NOVX ligand; or (iii) the ability of a mutant NOVX protein to bind to an intracellular target protein or biologically-active portion thereof; (e.g., avidin proteins). In yet another embodiment, a mutant NOVX protein can be assayed for the ability to regulate a specific biological function (e.g., regulation of insulin release).

Interfering RNA

[0095] In one aspect of the invention, NOVX gene expression can be attenuated by RNA interference. One approach well-known in the art is short interfering RNA (siRNA) mediated gene silencing where expression products of a NOVX gene are targeted by specific double stranded NOVX derived siRNA nucleotide sequences that are complementary to at least a 19-25 nt long segment of the NOVX gene transcript, including the 5′ untranslated (UT) region, the ORF, or the 3′ UT region. See, e.g., PCT applications WO00/44895, WO99/32619, WO01/75164, WO01/92513, WO 01/29058, WO01/89304, WO02/16620, and WO02/29858, each incorporated by reference herein in their entirety. Targeted genes can be a NOVX gene, or an upstream or downstream modulator of the NOVX gene. Nonlimiting examples of upstream or downstream modulators of a NOVX gene include, e.g., a transcription factor that binds the NOVX gene promoter, a kinase or phosphatase that interacts with a NOVX polypeptide, and polypeptides involved in a NOVX regulatory pathway.

[0096] According to the methods of the present invention, NOVX gene expression is silenced using short interfering RNA. A NOVX polynucleotide according to the invention includes a siRNA polynucleotide. Such a NOVX siRNA can be obtained using a NOVX polynucleotide sequence, for example, by processing the NOVX ribopolynucleotide sequence in a cell-free system, such as but not limited to a Drosophila extract, or by transcription of recombinant double stranded NOVX RNA or by chemical synthesis of nucleotide sequences homologous to a NOVX sequence. See, e.g., Tuschl, Zamore, Lehmann, Bartel and Sharp (1999), Genes & Dev. 13: 3191-3197, incorporated herein by reference in its entirety. When synthesized, a typical 0.2 micromolar-scale RNA synthesis provides about 1 milligram of siRNA, which is sufficient for 1000 transfection experiments using a 24-well tissue culture plate format.

[0097] The most efficient silencing is generally observed with siRNA duplexes composed of a 21-nt sense strand and a 21-nt antisense strand, paired in a manner to have a 2-nt 3′ overhang. The sequence of the 2-nt 3′ overhang makes an additional small contribution to the specificity of siRNA target recognition. The contribution to specificity is localized to the unpaired nucleotide adjacent to the first paired bases. In one embodiment, the nucleotides in the 3′ overhang are ribonucleotides. In an alternative embodiment, the nucleotides in the 3′ overhang are deoxyribonucleotides. Using 2′-deoxyribonucleotides in the 3′ overhangs is as efficient as using ribonucleotides, but deoxyribonucleotides are often cheaper to synthesize and are most likely more nuclease resistant.

[0098] A contemplated recombinant expression vector of the invention comprises a NOVX DNA molecule cloned into an expression vector comprising operatively-linked regulatory sequences flanking the NOVX sequence in a manner that allows for expression (by transcription of the DNA molecule) of both strands. An RNA molecule that is antisense to NOVX mRNA is transcribed by a first promoter (e.g., a promoter sequence 3′ of the cloned DNA) and an RNA molecule that is the sense strand for the NOVX mRNA is transcribed by a second promoter (e.g., a promoter sequence 5′ of the cloned DNA). The sense and antisense strands may hybridize in vivo to generate siRNA constructs for silencing of the NOVX gene. Alternatively, two constructs can be utilized to create the sense and anti-sense strands of a siRNA construct. Finally, cloned DNA can encode a construct having secondary structure, wherein a single transcript has both the sense and complementary antisense sequences from the target gene or genes. In an example of this embodiment, a hairpin RNAi product is homologous to all or a portion of the target gene. In another example, a hairpin RNAi product is a siRNA. The regulatory sequences flanking the NOVX sequence may be identical or may be different, such that their expression may be modulated independently, or in a temporal or spatial manner.

[0099] In a specific embodiment, siRNAs are transcribed intracellularly by cloning the NOVX gene templates into a vector containing, e.g., a RNA pol III transcription unit from the smaller nuclear RNA (snRNA) U6 or the human RNase P RNA H1. One example of a vector system is the GeneSuppressor™ RNA Interference kit (commercially available from Imgenex). The U6 and H1 promoters are members of the type III class of Pol III promoters. The +1 nucleotide of the U6-like promoters is always guanosine, whereas the +1 for H1 promoters is adenosine. The termination signal for these promoters is defined by five consecutive thymidines. The transcript is typically cleaved after the second uridine. Cleavage at this position generates a 3′ UU overhang in the expressed siRNA, which is similar to the 3′ overhangs of synthetic siRNAs. Any sequence less than 400 nucleotides in length can be transcribed by these promoter, therefore they are ideally suited for the expression of around 21-nucleotide siRNAs in, e.g., an approximately 50-nucleotide RNA stem-loop transcript.

[0100] A siRNA vector appears to have an advantage over synthetic siRNAs where long term knock-down of expression is desired. Cells transfected with a siRNA expression vector would experience steady, long-term mRNA inhibition. In contrast, cells transfected with exogenous synthetic siRNAs typically recover from mRNA suppression within seven days or ten rounds of cell division. The long-term gene silencing ability of siRNA expression vectors may provide for applications in gene therapy.

[0101] In general, siRNAs are chopped from longer dsRNA by an ATP-dependent ribonuclease called DICER. DICER is a member of the RNase III family of double-stranded RNA-specific endonucleases. The siRNAs assemble with cellular proteins into an endonuclease complex. In vitro studies in Drosophila suggest that the siRNAs/protein complex (siRNP) is then transferred to a second enzyme complex, called an RNA-induced silencing complex (RISC), which contains an endoribonuclease that is distinct from DICER. RISC uses the sequence encoded by the antisense siRNA strand to find and destroy mRNAs of complementary sequence. The siRNA thus acts as a guide, restricting the ribonuclease to cleave only mRNAs complementary to one of the two siRNA strands.

[0102] A NOVX mRNA region to be targeted by siRNA is generally selected from a desired NOVX sequence beginning 50 to 100 nt downstream of the start codon. Alternatively, 5′ or 3′ UTRs and regions nearby the start codon can be used but are generally avoided, as these may be richer in regulatory protein binding sites. UTR-binding proteins and/or translation initiation complexes may interfere with binding of the siRNP or RISC endonuclease complex. An initial BLAST homology search for the selected siRNA sequence is done against an available nucleotide sequence library to ensure that only one gene is targeted. Specificity of target recognition by siRNA duplexes indicate that a single point mutation located in the paired region of an siRNA duplex is sufficient to abolish target mRNA degradation. See, Elbashir et al. 2001 EMBO J. 20 (23):6877-88. Hence, consideration should be taken to accommodate SNPs, polymorphisms, allelic variants or species-specific variations when targeting a desired gene.

[0103] In one embodiment, a complete NOVX siRNA experiment includes the proper negative control. A negative control siRNA generally has the same nucleotide composition as the NOVX siRNA but lack significant sequence homology to the genome. Typically, one would scramble the nucleotide sequence of the NOVX siRNA and do a homology search to make sure it lacks homology to any other gene.

[0104] Two independent NOVX siRNA duplexes can be used to knock-down a target NOVX gene. This helps to control for specificity of the silencing effect. In addition, expression of two independent genes can be simultaneously knocked down by using equal concentrations of different NOVX siRNA duplexes, e.g., a NOVX siRNA and an siRNA for a regulator of a NOVX gene or polypeptide. Availability of siRNA-associating proteins is believed to be more limiting than target mRNA accessibility.

[0105] A targeted NOVX region is typically a sequence of two adenines (AA) and two thymidines (TT) divided by a spacer region of nineteen (N19) residues (e.g., AA(N19)TT). A desirable spacer region has a G/C-content of approximately 30% to 70%, and more preferably of about 50%. If the sequence AA(N19)TT is not present in the target sequence, an alternative target region would be AA(N21). The sequence of the NOVX sense siRNA corresponds to (N19)TT or N21, respectively. In the latter case, conversion of the 3′ end of the sense siRNA to TT can be performed if such a sequence does not naturally occur in the NOVX polynucleotide. The rationale for this sequence conversion is to generate a symmetric duplex with respect to the sequence composition of the sense and antisense 3′ overhangs.

[0106] Symmetric 3′ overhangs may help to ensure that the siRNPs are formed with approximately equal ratios of sense and antisense target RNA-cleaving siRNPs. See, e.g., Elbashir, Lendeckel and Tuschl (2001). Genes & Dev. 15: 188-200, incorporated by reference herein in its entirely. The modification of the overhang of the sense sequence of the siRNA duplex is not expected to affect targeted mRNA recognition, as the antisense siRNA strand guides target recognition.

[0107] Alternatively, if the NOVX target mRNA does not contain a suitable AA(N21) sequence, one may search for the sequence NA(N21). Further, the sequence of the sense strand and antisense strand may still be synthesized as 5′ (N19)TT, as it is believed that the sequence of the 3′-most nucleotide of the antisense siRNA does not contribute to specificity. Unlike antisense or ribozyme technology, the secondary structure of the target mRNA does not appear to have a strong effect on silencing. See, Harborth, et al. (2001) J. Cell Science 114: 4557-4565, incorporated by reference in its entirety.

[0108] Transfection of NOVX siRNA duplexes can be achieved using standard nucleic acid transfection methods, for example, OLIGOFECTAMINE Reagent (commercially available from Invitrogen). An assay for NOVX gene silencing is generally performed approximately 2 days after transfection. No NOVX gene silencing has been observed in the absence of transfection reagent, allowing for a comparative analysis of the wild-type and silenced NOVX phenotypes. In a specific embodiment, for one well of a 24-well plate, approximately 0.84 μg of the siRNA duplex is generally sufficient. Cells are typically seeded the previous day, and are transfected at about 50% confluence. The choice of cell culture media and conditions are routine to those of skill in the art, and will vary with the choice of cell type. The efficiency of transfection may depend on the cell type, but also on the passage number and the confluency of the cells. The time and the manner of formation of siRNA-liposome complexes (e.g., inversion versus vortexing) are also critical. Low transfection efficiencies are the most frequent cause of unsuccessful NOVX silencing. The efficiency of transfection needs to be carefully examined for each new cell line to be used. Preferred cell are derived from a mammal, more preferably from a rodent such as a rat or mouse, and most preferably from a human. Where used for therapeutic treatment, the cells are preferentially autologous, although non-autologous cell sources are also contemplated as within the scope of the present invention.

[0109] For a control experiment, transfection of 0.84 μg single-stranded sense NOVX siRNA will have no effect on NOVX silencing, and 0.84 μg antisense siRNA has a weak silencing effect when compared to 0.84 μg of duplex siRNAs. Control experiments again allow for a comparative analysis of the wild-type and silenced NOVX phenotypes. To control for transfection efficiency, targeting of common proteins is typically performed, for example targeting of lamin A/C or transfection of a CMV-driven EGFP-expression plasmid (e.g., commercially available from Clontech). In the above example, a determination of the fraction of lamin A/C knockdown in cells is determined the next day by such techniques as immunofluorescence, Western blot, Northern blot or other similar assays for protein expression or gene expression. Lamin A/C monoclonal antibodies may be obtained from Santa Cruz Biotechnology.

[0110] Depending on the abundance and the half life (or turnover) of the targeted NOVX polynucleotide in a cell, a knock-down phenotype may become apparent after 1 to 3 days, or even later. In cases where no NOVX knock-down phenotype is observed, depletion of the NOVX polynucleotide may be observed by immunofluorescence or Western blotting. If the NOVX polynucleotide is still abundant after 3 days, cells need to be split and transferred to a fresh 24-well plate for re-transfection. If no knock-down of the targeted protein is observed, it may be desirable to analyze whether the target mRNA (NOVX or a NOVX upstream or downstream gene) was effectively destroyed by the transfected siRNA duplex. Two days after transfection, total RNA is prepared, reverse transcribed using a target-specific primer, and PCR-amplified with a primer pair covering at least one exon-exon junction in order to control for amplification of pre-mRNAs. RT/PCR of a non-targeted mRNA is also needed as control. Effective depletion of the mRNA yet undetectable reduction of target protein may indicate that a large reservoir of stable NOVX protein may exist in the cell. Multiple transfection in sufficiently long intervals may be necessary until the target protein is finally depleted to a point where a phenotype may become apparent. If multiple transfection steps are required, cells are split 2 to 3 days after transfection. The cells may be transfected immediately after splitting.

[0111] An inventive therapeutic method of the invention contemplates administering a NOVX siRNA construct as therapy to compensate for increased or aberrant NOVX expression or activity. The NOVX ribopolynucleotide is obtained and processed into siRNA fragments, or a NOVX siRNA is synthesized, as described above. The NOVX siRNA is administered to cells or tissues using known nucleic acid transfection techniques, as described above. A NOVX siRNA specific for a NOVX gene will decrease or knockdown NOVX transcription products, which will lead to reduced NOVX polypeptide production, resulting in reduced NOVX polypeptide activity in the cells or tissues.

[0112] The present invention also encompasses a method of treating a disease or condition associated with the presence of a NOVX protein in an individual comprising administering to the individual an RNAi construct that targets the mRNA of the protein (the mRNA that encodes the protein) for degradation. A specific RNAi construct includes a siRNA or a double stranded gene transcript that is processed into siRNAs. Upon treatment, the target protein is not produced or is not produced to the extent it would be in the absence of the treatment.

[0113] Where the NOVX gene function is not correlated with a known phenotype, a control sample of cells or tissues from healthy individuals provides a reference standard for determining NOVX expression levels. Expression levels are detected using the assays described, e.g., RT-PCR, Northern blotting, Western blotting, ELISA, and the like. A subject sample of cells or tissues is taken from a mammal, preferably a human subject, suffering from a disease state. The NOVX ribopolynucleotide is used to produce siRNA constructs, that are specific for the NOVX gene product. These cells or tissues are treated by administering NOVX siRNA's to the cells or tissues by methods described for the transfection of nucleic acids into a cell or tissue, and a change in NOVX polypeptide or polynucleotide expression is observed in the subject sample relative to the control sample, using the assays described. This NOVX gene knockdown approach provides a rapid method for determination of a NOVX minus (NOVX⁻) phenotype in the treated subject sample. The NOVX⁻ phenotype observed in the treated subject sample thus serves as a marker for monitoring the course of a disease state during treatment.

[0114] In specific embodiments, a NOVX siRNA is used in therapy. Methods for the generation and use of a NOVX siRNA are known to those skilled in the art. Example techniques are provided below.

[0115] Production of RNAs

[0116] Sense RNA (ssRNA) and antisense RNA (asRNA) of NOVX are produced using known methods such as transcription in RNA expression vectors. In the initial experiments, the sense and antisense RNA are about 500 bases in length each. The produced ssRNA and asRNA (0.5 μM) in 10 mM Tris-HCl (pH 7.5) with 20 mM NaCl were heated to 95° C. for 1 min then cooled and annealed at room temperature for 12 to 16 h. The RNAs are precipitated and resuspended in lysis buffer (below). To monitor annealing, RNAs are electrophoresed in a 2% agarose gel in TBE buffer and stained with ethidium bromide. See, e.g., Sambrook et al., Molecular Cloning. Cold Spring Harbor Laboratory Press, Plainview, N.Y. (1989).

[0117] Lysate Preparation

[0118] Untreated rabbit reticulocyte lysate (Ambion) are assembled according to the manufacturer's directions. dsRNA is incubated in the lysate at 30° C. for 10 min prior to the addition of mRNAs. Then NOVX mRNAs are added and the incubation continued for an additional 60 min. The molar ratio of double stranded RNA and mRNA is about 200:1. The NOVX mRNA is radiolabeled (using known techniques) and its stability is monitored by gel electrophoresis.

[0119] In a parallel experiment made with the same conditions, the double stranded RNA is internally radiolabeled with a ³²P-ATP. Reactions are stopped by the addition of 2×-proteinase-K buffer and deproteinized as described previously (Tuschl et al., Genes Dev., 13:3191-3197 (1999)). Products are analyzed by electrophoresis in 15% or 18% polyacrylamide sequencing gels using appropriate RNA standards. By monitoring the gels for radioactivity, the natural production of 10 to 25 nt RNAs from the double stranded RNA can be determined.

[0120] The band of double stranded RNA, about 21-23 bps, is eluded. The efficacy of these 21-23 mers for suppressing NOVX transcription is assayed in vitro using the same rabbit reticulocyte assay described above using 50 nanomolar of double stranded 21-23 mer for each assay. The sequence of these 21-23 mers is then determined using standard nucleic acid sequencing techniques.

[0121] RNA Preparation

[0122] 21 nt RNAs, based on the sequence determined above, are chemically synthesized using Expedite RNA phosphoramidites and thymidine phosphoramidite (Proligo, Germany). Synthetic oligonucleotides are deprotected and gel-purified (Elbashir, Lendeckel, & Tuschl, Genes & Dev. 15, 188-200 (2001)), followed by Sep-Pak C18 cartridge (Waters, Milford, Mass., USA) purification (Tuschl, et al., Biochemistry, 32:11658-11668 (1993)). These RNAs (20 μM) single strands are incubated in annealing buffer (100 mM potassium acetate, 30 mM HEPES-KOH at pH 7.4, 2 mM magnesium acetate) for 1 min at 90° C. followed by 1 h at 37° C.

[0123] Cell Culture

[0124] A cell culture known in the art to regularly express NOVX is propagated using standard conditions. 24 hours before transfection, at approx. 80% confluency, the cells are trypsinized and diluted 1:5 with fresh medium without antibiotics (1-3×105 cells/ml) and transferred to 24-well plates (500 ml/well). Transfection is performed using a commercially available lipofection kit and NOVX expression is monitored using standard techniques with positive and negative control. A positive control is cells that naturally express NOVX while a negative control is cells that do not express NOVX. Base-paired 21 and 22 nt siRNAs with overhanging 3′ ends mediate efficient sequence-specific mRNA degradation in lysates and in cell culture. Different concentrations of siRNAs are used. An efficient concentration for suppression in vitro in mammalian culture is between 25 nM to 100 nM final concentration. This indicates that siRNAs are effective at concentrations that are several orders of magnitude below the concentrations applied in conventional antisense or ribozyme gene targeting experiments.

[0125] The above method provides a way both for the deduction of NOVX siRNA sequence and the use of such siRNA for in vitro suppression. In vivo suppression may be performed using the same siRNA using well known in-vivo transfection or gene therapy transfection techniques.

Antisense Nucleic Acids

[0126] Another aspect of the invention pertains to isolated antisense nucleic acid molecules that are hybridizable to or complementary to the nucleic acid molecule comprising the nucleotide sequence of SEQ ID NO:2n-1, wherein n is an integer between 1 and 85, or fragments, analogs or derivatives thereof. An “antisense” nucleic acid comprises a nucleotide sequence that is complementary to a “sense” nucleic acid encoding a protein (e.g., complementary to the coding strand of a double-stranded cDNA molecule or complementary to an mRNA sequence). In specific aspects, antisense nucleic acid molecules are provided that comprise a sequence complementary to at least about 10, 25, 50, 100, 250 or 500 nucleotides or an entire NOVX coding strand, or to only a portion thereof. Nucleic acid molecules encoding fragments, homologs, derivatives and analogs of a NOVX protein of SEQ ID NO:2n, wherein n is an integer between 1 and 85, or antisense nucleic acids complementary to a NOVX nucleic acid sequence of SEQ ID NO:2n-1, wherein n is an integer between 1 and 85, are additionally provided.

[0127] In one embodiment, an antisense nucleic acid molecule is antisense to a “coding region” of the coding strand of a nucleotide sequence encoding a NOYX protein. The term “coding region” refers to the region of the nucleotide sequence comprising codons which are translated into amino acid residues. In another embodiment, the antisense nucleic acid molecule is antisense to a “noncoding region” of the coding strand of a nucleotide sequence encoding the NOVX protein. The term “noncoding region” refers to 5′ and 3′ sequences that flank the coding region that are not translated into amino acids (i.e., also referred to as 5′ and 3′ untranslated regions).

[0128] Given the coding strand sequences encoding the NOVX protein disclosed herein, antisense nucleic acids of the invention can be designed according to the rules of Watson and Crick or Hoogsteen base pairing. The antisense nucleic acid molecule can be complementary to the entire coding region of NOVX mRNA, but more preferably is an oligonucleotide that is antisense to only a portion of the coding or noncoding region of NOVX mRNA. For example, the antisense oligonucleotide can be complementary to the region surrounding the translation start site of NOVX mRNA. An antisense oligonucleotide can be, for example, about 5, 10, 15, 20, 25, 30, 35, 40, 45 or 50 nucleotides in length. An antisense nucleic acid of the invention can be constructed using chemical synthesis or enzymatic ligation reactions using procedures known in the art. For example, an antisense nucleic acid (e.g., an antisense oligonucleotide) can be chemically synthesized using naturally-occurring nucleotides or variously modified nucleotides designed to increase the biological stability of the molecules or to increase the physical stability of the duplex formed between the antisense and sense nucleic acids (e.g., phosphorothioate derivatives and acridine substituted nucleotides can be used).

[0129] Examples of modified nucleotides that can be used to generate the antisense nucleic acid include: 5-fluorouracil, 5-bromouracil, 5-chlorouracil, 5-iodouracil, hypoxanthine, xanthine, 4-acetylcytosine, 5-carboxymethylaminomethyl-2-thiouridine, 5-(carboxyhydroxylmethyl) uracil, 5-carboxymethylaminomethyluracil, dihydrouracil, beta-D-galactosylqueosine, inosine, N6-isopentenyladenine, 1-methylguanine, 1-methylinosine, 2,2-dimethylguanine, 2-methyladenine, 2-methylguanine, 5-methoxyuracil, 3-methylcytosine, 5-methylcytosine, N6-adenine, 7-methylguanine, 5-methylaminomethyluracil, 5-methoxyaminomethyl-2-thiouracil, 2-thiouracil, 4-thiouracil, beta-D-mannosylqueosine, 5′-methoxycarboxymethyluracil, 2-methylthio-N-6-isopentenyladenine, uracil-5-oxyacetic acid (v), wybutoxosine, pseudouracil, queosine, 2-thiocytosine, 5-methyl-2-thiouracil, 5-methyluracil, uracil-5-oxyacetic acid methylester, uracil-5-oxyacetic acid (v), 5-methyl-2-thiouracil, 3-(3-amino-3-N-2-carboxypropyl) uracil, (acp3)w, and 2,6-diaminopurine. Alternatively, the antisense nucleic acid can be produced biologically using an expression vector into which a nucleic acid has been subcloned in an antisense orientation (i.e., RNA transcribed from the inserted nucleic acid will be of an antisense orientation to a target nucleic acid of interest, described further in the following subsection). The antisense nucleic acid molecules of the invention are typically administered to a subject or generated in situ such that they hybridize with or bind to cellular mRNA and/or genomic DNA encoding a NOVX protein to thereby inhibit expression of the protein (e.g. by inhibiting transcription and/or translation). The hybridization can be by conventional nucleotide complementarity to form a stable duplex, or, for example, in the case of an antisense nucleic acid molecule that binds to DNA duplexes, through specific interactions in the major groove of the double helix. An example of a route of administration of antisense nucleic acid molecules of the invention includes direct injection at a tissue site. Alternatively, antisense nucleic acid molecules can be modified to target selected cells and then administered systemically. For example, for systemic administration, antisense molecules can be modified such that they specifically bind to receptors or antigens expressed on a selected cell surface (e.g., by linking the antisense nucleic acid molecules to peptides or antibodies that bind to cell surface receptors or antigens). The antisense nucleic acid molecules can also be delivered to cells using the vectors described herein. To achieve sufficient nucleic acid molecules, vector constructs in which the antisense nucleic acid molecule is placed under the control of a strong pol II or pol III promoter are preferred. In yet another embodiment, the antisense nucleic acid molecule of the invention is an α-anomeric nucleic acid molecule. An α-anomeric nucleic acid molecule forms specific double-stranded hybrids with complementary RNA in which, contrary to the usual β-units, the strands run parallel to each other. See, e.g., Gaultier, et al., 1987. Nucl. Acids Res. 15: 6625-6641. The antisense nucleic acid molecule can also comprise a 2′-o-methylribonucleotide (See, e.g., Inoue, et al. 1987. Nucl. Acids Res. 15: 6131-6148) or a chimeric RNA-DNA analogue (See, e.g., Inoue, et al., 1987. FEBS Lett. 215: 327-330.

[0130] Ribozymes and PNA Moieties

[0131] Nucleic acid modifications include, by way of non-limiting example, modified bases, and nucleic acids whose sugar phosphate backbones are modified or derivatized. These modifications are carried out at least in part to enhance the chemical stability of the modified nucleic acid, such that they may be used, for example, as antisense binding nucleic acids in therapeutic applications in a subject.

[0132] In one embodiment, an antisense nucleic acid of the invention is a ribozyme. Ribozymes are catalytic RNA molecules with ribonuclease activity that are capable of cleaving a single-stranded nucleic acid, such as an mRNA, to which they have a complementary region. Thus, ribozymes (e.g., hammerhead ribozymes as described in Haselhoff and Gerlach 1988. Nature 334: 585-591) can be used to catalytically cleave NOVX mRNA transcripts to thereby inhibit translation of NOVX mRNA. A ribozyme having specificity for a NOVX-encoding nucleic acid can be designed based upon the nucleotide sequence of a NOVX cDNA disclosed herein (i.e., SEQ ID NO:2n-1, wherein n is an integer between 1 and 85). For example, a derivative of a Tetrahymena L-19 IVS RNA can be constructed in which the nucleotide sequence of the active site is complementary to the nucleotide sequence to be cleaved in a NOVX-encoding mRNA. See, e.g., U.S. Pat. No. 4,987,071 to Cech, et al. and U.S. Pat. No. 5,116,742 to Cech, et al. NOVX mRNA can also be used to select a catalytic RNA having a specific ribonuclease activity from a pool of RNA molecules. See, e.g., Bartel et al., (1993) Science 261:1411-1418.

[0133] Alternatively, NOVX gene expression can be inhibited by targeting nucleotide sequences complementary to the regulatory region of the NOVX nucleic acid (e.g., the NOVX promoter and/or enhancers) to form triple helical structures that prevent transcription of the NOVX gene in target cells. See, e.g., Helene, 1991. Anticancer Drug Des. 6: 569-84; Helene, et al. 1992. Ann. N.Y. Acad. Sci. 660: 27-36; Maher, 1992. Bioassays 14: 807-15. In various embodiments, the NOVX nucleic acids can be modified at the base moiety, sugar moiety or phosphate backbone to improve, e.g., the stability, hybridization, or solubility of the molecule. For example, the deoxyribose phosphate backbone of the nucleic acids can be modified to generate peptide nucleic acids. See, e.g., Hyrup, et al., 1996. Bioorg Med Chem 4: 5-23. As used herein, the terms “peptide nucleic acids” or “PNAs” refer to nucleic acid mimics (e.g., DNA mimics) in which the deoxyribose phosphate backbone is replaced by a pseudopeptide backbone and only the four natural nucleotide bases are retained. The neutral backbone of PNAs has been shown to allow for specific hybridization to DNA and RNA under conditions of low ionic strength. The synthesis of PNA oligomer can be performed using standard solid phase peptide synthesis protocols as described in Hyrup, et al., 1996. supra; Perry-O'Keefe, et al., 1996. Proc. Natl. Acad. Sci. USA 93: 14670-14675. PNAs of NOVX can be used in therapeutic and diagnostic applications. For example, PNAs can be used as antisense or antigene agents for sequence-specific modulation of gene expression by, e.g., inducing transcription or translation arrest or inhibiting replication. PNAs of NOVX can also be used, for example, in the analysis of single base pair mutations in a gene (e.g., PNA directed PCR clamping; as artificial restriction enzymes when used in combination with other enzymes, e.g., S₁ nucleases (See, Hyrup, et al., 1996. supra); or as probes or primers for DNA sequence and hybridization (See, Hyrup, et al., 1996, supra; Perry-O'Keefe, et al., 1996. supra).

[0134] In another embodiment, PNAs of NOVX can be modified, e.g., to enhance their stability or cellular uptake, by attaching lipophilic or other helper groups to PNA, by the formation of PNA-DNA chimeras, or by the use of liposomes or other techniques of drug delivery known in the art. For example, PNA-DNA chimeras of NOVX can be generated that may combine the advantageous properties of PNA and DNA. Such chimeras allow DNA recognition enzymes (e.g., RNase H and DNA polymerases) to interact with the DNA portion while the PNA portion would provide high binding affinity and specificity. PNA-DNA chimeras can be linked using linkers of appropriate lengths selected in terms of base stacking, number of bonds between the nucleotide bases, and orientation (see, Hyrup, et al., 1996. supra). The synthesis of PNA-DNA chimeras can be performed as described in Hyrup, et al., 1996. supra and Finn, et al., 1996. Nucl Acids Res 24: 3357-3363. For example, a DNA chain can be synthesized on a solid support using standard phosphoramidite coupling chemistry, and modified nucleoside analogs, e.g., 5′-(4-methoxytrityl)-amino-5′-deoxy-thymidine phosphoramidite, can be used between the PNA and the 5′ end of DNA. See, e.g., Mag, et al., 1989. Nucl Acid Res 17: 5973-5988. PNA monomers are then coupled in a stepwise manner to produce a chimeric molecule with a 5′ PNA segment and a 3′ DNA segment. See, e.g., Finn, et al., 1996. supra. Alternatively, chimeric molecules can be synthesized with a 5′ DNA segment and a 3′ PNA segment. See, e.g., Petersen, et al., 1975. Bioorg. Med. Chem. Lett. 5: 1119-11124.

[0135] In other embodiments, the oligonucleotide may include other appended groups such as peptides (e.g., for targeting host cell receptors in vivo), or agents facilitating transport across the cell membrane (see, e.g., Letsinger, et al., 1989. Proc. Natl. Acad. Sci. U.S.A. 86: 6553-6556; Lemaitre, et al., 1987. Proc. Natl. Acad. Sci. 84: 648-652; PCT Publication No. WO88/09810) or the blood-brain barrier (see, e.g., PCT Publication No. WO 89/10134). In addition, oligonucleotides can be modified with hybridization-triggered cleavage agents (see, e.g., Krol, et al., 1988. BioTechniques 6:958-976) or intercalating agents (see, e.g., Zon, 1988. Pharm. Res. 5: 539-549). To this end, the oligonucleotide may be conjugated to another molecule, e.g., a peptide, a hybridization triggered cross-linking agent, a transport agent, a hybridization-triggered cleavage agent, and the like.

NOVX Polypeptides

[0136] A polypeptide according to the invention includes a polypeptide including the amino acid sequence of NOVX polypeptides whose sequences are provided in any one of SEQ ID NO:2n, wherein n is an integer between 1 and 85. The invention also includes a mutant or variant protein any of whose residues may be changed from the corresponding residues shown in any one of SEQ ID NO:2n, wherein n is an integer between 1 and 85, while still encoding a protein that maintains its NOVX activities and physiological functions, or a functional fragment thereof.

[0137] In general, a NOVX variant that preserves NOVX-like function includes any variant in which residues at a particular position in the sequence have been substituted by other amino acids, and further include the possibility of inserting an additional residue or residues between two residues of the parent protein as well as the possibility of deleting one or more residues from the parent sequence. Any amino acid substitution, insertion, or deletion is encompassed by the invention. In favorable circumstances, the substitution is a conservative substitution as defined above.

[0138] One aspect of the invention pertains to isolated NOVX proteins, and biologically-active portions thereof, or derivatives, fragments, analogs or homologs thereof. Also provided are polypeptide fragments suitable for use as immunogens to raise anti-NOVX antibodies. In one embodiment, native NOVX proteins can be isolated from cells or tissue sources by an appropriate purification scheme using standard protein purification techniques. In another embodiment, NOVX proteins are produced by recombinant DNA techniques. Alternative to recombinant expression, a NOVX protein or polypeptide can be synthesized chemically using standard peptide synthesis techniques.

[0139] An “isolated” or “purified” polypeptide or protein or biologically-active portion thereof is substantially free of cellular material or other contaminating proteins from the cell or tissue source from which the NOVX protein is derived, or substantially free from chemical precursors or other chemicals when chemically synthesized. The language “substantially free of cellular material” includes preparations of NOVX proteins in which the protein is separated from cellular components of the cells from which it is isolated or recombinantly-produced. In one embodiment, the language “substantially free of cellular material” includes preparations of NOVX proteins having less than about 30% (by dry weight) of non-NOVX proteins (also referred to herein as a “contaminating protein”), more preferably less than about 20% of non-NOVX proteins, still more preferably less than about 10% of non-NOVX proteins, and most preferably less than about 5% of non-NOVX proteins. When the NOVX protein or biologically-active portion thereof is recombinantly-produced, it is also preferably substantially free of culture medium, i.e., culture medium represents less than about 20%, more preferably less than about 10%, and most preferably less than about 5% of the volume of the NOVX protein preparation. The language “substantially free of chemical precursors or other chemicals” includes preparations of NOVX proteins in which the protein is separated from chemical precursors or other chemicals that are involved in the synthesis of the protein. In one embodiment, the language “substantially free of chemical precursors or other chemicals” includes preparations of NOVX proteins having less than about 30% (by dry weight) of chemical precursors or non-NOVX chemicals, more preferably less than about 20% chemical precursors or non-NOVX chemicals, still more preferably less than about 10% chemical precursors or non-NOVX chemicals, and most preferably less than about 5% chemical precursors or non-NOVX chemicals.

[0140] Biologically-active portions of NOVX proteins include peptides comprising amino acid sequences sufficiently homologous to or derived from the amino acid sequences of the NOVX proteins (e.g., the amino acid sequence of SEQ ID NO:2n, wherein n is an integer between 1 and 85) that include fewer amino acids than the full-length NOVX proteins, and exhibit at least one activity of a NOVX protein. Typically, biologically-active portions comprise a domain or motif with at least one activity of the NOVX protein. A biologically-active portion of a NOVX protein can be a polypeptide which is, for example, 10, 25, 50, 100 or more amino acid residues in length.

[0141] Moreover, other biologically-active portions, in which other regions of the protein are deleted, can be prepared by recombinant techniques and evaluated for one or more of the functional activities of a native NOVX protein.

[0142] In an embodiment, the NOVX protein has an amino acid sequence of SEQ ID NO:2n, wherein n is an integer between 1 and 85. In other embodiments, the NOVX protein is substantially homologous to SEQ ID NO:2n, wherein n is an integer between 1 and 85, and retains the functional activity of the protein of SEQ ID NO:2n, wherein n is an integer between 1 and 85, yet differs in amino acid sequence due to natural allelic variation or mutagenesis, as described in detail, below. Accordingly, in another embodiment, the NOVX protein is a protein that comprises an amino acid sequence at least about 45% homologous to the amino acid sequence of SEQ ID NO:2n, wherein n is an integer between 1 and 85, and retains the functional activity of the NOVX proteins of SEQ ID NO:2n, wherein n is an integer between 1 and 85.

[0143] Determining Homology Between Two or More Sequences

[0144] To determine the percent homology of two amino acid sequences or of two nucleic acids, the sequences are aligned for optimal comparison purposes (e.g., gaps can be introduced in the sequence of a first amino acid or nucleic acid sequence for optimal alignment with a second amino or nucleic acid sequence). The amino acid residues or nucleotides at corresponding amino acid positions or nucleotide positions are then compared. When a position in the first sequence is occupied by the same amino acid residue or nucleotide as the corresponding position in the second sequence, then the molecules are homologous at that position (i.e., as used herein amino acid or nucleic acid “homology” is equivalent to amino acid or nucleic acid “identity”).

[0145] The nucleic acid sequence homology may be determined as the degree of identity between two sequences. The homology may be determined using computer programs known in the art, such as GAP software provided in the GCG program package. See, Needleman and Wunsch, 1970. J Mol Biol 48: 443-453. Using GCG GAP software with the following settings for nucleic acid sequence comparison: GAP creation penalty of 5.0 and GAP extension penalty of 0.3, the coding region of the analogous nucleic acid sequences referred to above exhibits a degree of identity preferably of at least 70%, 75%, 80%, 85%, 90%, 95%, 98%, or 99%, with the CDS (encoding) part of the DNA sequence of SEQ ID NO:2n-1, wherein n is an integer between 1 and 85.

[0146] The term “sequence identity” refers to the degree to which two polynucleotide or polypeptide sequences are identical on a residue-by-residue basis over a particular region of comparison. The term “percentage of sequence identity” is calculated by comparing two optimally aligned sequences over that region of comparison, determining the number of positions at which the identical nucleic acid base (e.g., A, T, C, G, U, or I, in the case of nucleic acids) occurs in both sequences to yield the number of matched positions, dividing the number of matched positions by the total number of positions in the region of comparison (i.e., the window size), and multiplying the result by 100 to yield the percentage of sequence identity. The term “substantial identity” as used herein denotes a characteristic of a polynucleotide sequence, wherein the polynucleotide comprises a sequence that has at least 80 percent sequence identity, preferably at least 85 percent identity and often 90 to 95 percent sequence identity, more usually at least 99 percent sequence identity as compared to a reference sequence over a comparison region.

[0147] Chimeric and Fusion Proteins

[0148] The invention also provides NOVX chimeric or fusion proteins. As used herein, a NOVX “chimeric protein” or “fusion protein” comprises a NOVX polypeptide operatively-linked to a non-NOVX polypeptide. An “NOVX polypeptide” refers to a polypeptide having an amino acid sequence corresponding to a NOVX protein of SEQ ID NO:2n, wherein n is an integer between 1 and 85, whereas a “non-NOVX polypeptide” refers to a polypeptide having an amino acid sequence corresponding to a protein that is not substantially homologous to the NOVX protein, e.g., a protein that is different from the NOVX protein and that is derived from the same or a different organism. Within a NOVX fusion protein the NOVX polypeptide can correspond to all or a portion of a NOVX protein. In one embodiment, a NOVX fusion protein comprises at least one biologically-active portion of a NOVX protein. In another embodiment, a NOVX fusion protein comprises at least two biologically-active portions of a NOVX protein. In yet another embodiment, a NOVX fusion protein comprises at least three biologically-active portions of a NOVX protein. Within the fusion protein, the term “operatively-linked” is intended to indicate that the NOVX polypeptide and the non-NOVX polypeptide are fused in-frame with one another. The non-NOVX polypeptide can be fused to the N-terminus or C-terminus of the NOVX polypeptide.

[0149] In one embodiment, the fusion protein is a GST-NOVX fusion protein in which the NOVX sequences are fused to the C-terminus of the GST (glutathione S-transferase) sequences. Such fusion proteins can facilitate the purification of recombinant NOVX polypeptides. In another embodiment, the fusion protein is a NOVX protein containing a heterologous signal sequence at its N-terminus. In certain host cells (e.g., mammalian host cells), expression and/or secretion of NOVX can be increased through use of a heterologous signal sequence.

[0150] In yet another embodiment, the fusion protein is a NOVX-immunoglobulin fusion protein in which the NOVX sequences are fused to sequences derived from a member of the immunoglobulin protein family. The NOVX-immunoglobulin fusion proteins of the invention can be incorporated into pharmaceutical compositions and administered to a subject to inhibit an interaction between a NOVX ligand and a NOVX protein on the surface of a cell, to thereby suppress NOVX-mediated signal transduction in vivo. The NOVX-immunoglobulin fusion proteins can be used to affect the bioavailability of a NOVX cognate ligand. Inhibition of the NOVX ligand/NOVX interaction may be useful therapeutically for both the treatment of proliferative and differentiative disorders, as well as modulating (e.g., promoting or inhibiting) cell survival. Moreover, the NOVX-immunoglobulin fusion proteins of the invention can be used as immunogens to produce anti-NOVX antibodies in a subject, to purify NOVX ligands, and in screening assays to identify molecules that inhibit the interaction of NOVX with a NOVX ligand. A NOVX chimeric or fusion protein of the invention can be produced by standard recombinant DNA techniques. For example, DNA fragments coding for the different polypeptide sequences are ligated together in-frame in accordance with conventional techniques, e.g., by employing blunt-ended or stagger-ended termini for ligation, restriction enzyme digestion to provide for appropriate termini, filling-in of cohesive ends as appropriate, alkaline phosphatase treatment to avoid undesirable joining, and enzymatic ligation. In another embodiment, the fusion gene can be synthesized by conventional techniques including automated DNA synthesizers. Alternatively, PCR amplification of gene fragments can be carried out using anchor primers that give rise to complementary overhangs between two consecutive gene fragments that can subsequently be annealed and reamplified to generate a chimeric gene sequence (see, e.g., Ausubel, et al. (eds.) CURRENT PROTOCOLS IN MOLECULAR BIOLOGY, John Wiley & Sons, 1992). Moreover, many expression vectors are commercially available that already encode a fusion moiety (e.g. a GST polypeptide). A NOVX-encoding nucleic acid can be cloned into such an expression vector such that the fusion moiety is linked in-frame to the NOVX protein.

[0151] NOVX Agonists and Antagonists

[0152] The invention also pertains to variants of the NOVX proteins that function as either NOVX agonists (i.e., mimetics) or as NOVX antagonists. Variants of the NOVX protein can be generated by mutagenesis (e.g., discrete point mutation or truncation of the NOVX protein). An agonist of the NOVX protein can retain substantially the same, or a subset of, the biological activities of the naturally occurring form of the NOVX protein. An antagonist of the NOVX protein can inhibit one or more of the activities of the naturally occurring form of the NOVX protein by, for example, competitively binding to a downstream or upstream member of a cellular signaling cascade which includes the NOVX protein. Thus, specific biological effects can be elicited by treatment with a variant of limited function. In one embodiment, treatment of a subject with a variant having a subset of the biological activities of the naturally occurring form of the protein has fewer side effects in a subject relative to treatment with the naturally occurring form of the NOVX proteins.

[0153] Variants of the NOVX proteins that function as either NOVX agonists (i.e., mimetics) or as NOVX antagonists can be identified by screening combinatorial libraries of mutants (e.g., truncation mutants) of the NOVX proteins for NOVX protein agonist or antagonist activity. In one embodiment, a variegated library of NOVX variants is generated by combinatorial mutagenesis at the nucleic acid level and is encoded by a variegated gene library. A variegated library of NOVX variants can be produced by, for example, enzymatically ligating a mixture of synthetic oligonucleotides into gene sequences such that a degenerate set of potential NOVX sequences is expressible as individual polypeptides, or alternatively, as a set of larger fusion proteins (e.g., for phage display) containing the set of NOVX sequences therein. There are a variety of methods which can be used to produce libraries of potential NOVX variants from a degenerate oligonucleotide sequence. Chemical synthesis of a degenerate gene sequence can be performed in an automatic DNA synthesizer, and the synthetic gene then ligated into an appropriate expression vector. Use of a degenerate set of genes allows for the provision, in one mixture, of all of the sequences encoding the desired set of potential NOVX sequences. Methods for synthesizing degenerate oligonucleotides are well-known within the art. See, e.g., Narang, 1983. Tetrahedron 39: 3; Itakura, et al., 1984. Annu. Rev. Biochem. 53: 323; Itakura, et al., 1984. Science 198: 1056; Ike, et al., 1983. Nucl. Acids Res. 11: 477.

[0154] Polypeptide Libraries

[0155] In addition, libraries of fragments of the NOVX protein coding sequences can be used to generate a variegated population of NOVX fragments for screening and subsequent selection of variants of a NOVX protein. In one embodiment, a library of coding sequence fragments can be generated by treating a double stranded PCR fragment of a NOVX coding sequence with a nuclease under conditions wherein nicking occurs only about once per molecule, denaturing the double stranded DNA, renaturing the DNA to form double-stranded DNA that can include sense/antisense pairs from different nicked products, removing single stranded portions from reformed duplexes by treatment with S₁ nuclease, and ligating the resulting fragment library into an expression vector. By this method, expression libraries can be derived which encodes N-terminal and internal fragments of various sizes of the NOVX proteins.

[0156] Various techniques are known in the art for screening gene products of combinatorial libraries made by point mutations or truncation, and for screening cDNA libraries for gene products having a selected property. Such techniques are adaptable for rapid screening of the gene libraries generated by the combinatorial mutagenesis of NOVX proteins. The most widely used techniques, which are amenable to high throughput analysis, for screening large gene libraries typically include cloning the gene library into replicable expression vectors, transforming appropriate cells with the resulting library of vectors, and expressing the combinatorial genes under conditions in which detection of a desired activity facilitates isolation of the vector encoding the gene whose product was detected. Recursive ensemble mutagenesis (REM), a new technique that enhances the frequency of functional mutants in the libraries, can be used in combination with the screening assays to identify NOVX variants. See, e.g., Arkin and Yourvan, 1992. Proc. Natl. Acad. Sci. USA 89: 7811-7815; Delgrave, et al., 1993. Protein Engineering 6:327-331.

Anti-NOVX Antibodies

[0157] Included in the invention are antibodies to NOVX proteins, or fragments of NOVX proteins. The term “antibody” as used herein refers to immunoglobulin molecules and immunologically active portions of immunoglobulin (Ig) molecules, i.e., molecules that contain an antigen-binding site that specifically binds (immunoreacts with) an antigen. Such antibodies include, but are not limited to, polyclonal, monoclonal, chimeric, single chain, F_{ab}, F_{ab′} and F_{(ab′)2} fragments, and an F_{ab} expression library. In general, antibody molecules obtained from humans relates to any of the classes IgG, IgM, IgA, IgE and IgD, which differ from one another by the nature of the heavy chain present in the molecule. Certain classes have subclasses as well, such as IgG₁, IgG₂, and others. Furthermore, in humans, the light chain may be a kappa chain or a lambda chain. Reference herein to antibodies includes a reference to all such classes, subclasses and types of human antibody species.

[0158] An isolated protein of the invention intended to serve as an antigen, or a portion or fragment thereof, can be used as an immunogen to generate antibodies that immunospecifically bind the antigen, using standard techniques for polyclonal and monoclonal antibody preparation. The full-length protein can be used or, alternatively, the invention provides antigenic peptide fragments of the antigen for use as immunogens. An antigenic peptide fragment comprises at least 6 amino acid residues of the amino acid sequence of the full length protein, such as an amino acid sequence of SEQ ID NO:2n, wherein n is an integer between 1 and 85, and encompasses an epitope thereof such that an antibody raised against the peptide forms a specific immune complex with the full length protein or with any fragment that contains the epitope. Preferably, the antigenic peptide comprises at least 10 amino acid residues, or at least 15 amino acid residues, or at least 20 amino acid residues, or at least 30 amino acid residues. Preferred epitopes encompassed by the antigenic peptide are regions of the protein that are located on its surface; commonly these are hydrophilic regions.

[0159] In certain embodiments of the invention, at least one epitope encompassed by the antigenic peptide is a region of NOVX that is located on the surface of the protein, e.g., a hydrophilic region. A hydrophobicity analysis of the human NOVX protein sequence will indicate which regions of a NOVX polypeptide are particularly hydrophilic and, therefore, are likely to encode surface residues useful for targeting antibody production. As a means for targeting antibody production, hydropathy plots showing regions of hydrophilicity and hydrophobicity may be generated by any method well known in the art, including, for example, the Kyte Doolittle or the Hopp Woods methods, either with or without Fourier transformation. See, e.g., Hopp and Woods, 1981, Proc. Nat. Acad. Sci. USA 78: 3824-3828; Kyte and Doolittle 1982, J. Mol. Biol. 157: 105-142, each incorporated herein by reference in their entirety. Antibodies that are specific for one or more domains within an antigenic protein, or derivatives, fragments, analogs or homologs thereof, are also provided herein.

[0160] The term “epitope” includes any protein determinant capable of specific binding to an immunoglobulin or T-cell receptor. Epitopic determinants usually consist of chemically active surface groupings of molecules such as amino acids or sugar side chains and usually have specific three-dimensional structural characteristics, as well as specific charge characteristics. A NOVX polypeptide or a fragment thereof comprises at least one antigenic epitope. An anti-NOVX antibody of the present invention is said to specifically bind to antigen NOVX when the equilibrium binding constant (K_{D}) is ≦1 μM, preferably ≦100 nM, more preferably ≦10 nM, and most preferably ≦100 pM to about 1 pM, as measured by assays such as radioligand binding assays or similar assays known to those skilled in the art. A protein of the invention, or a derivative, fragment, analog, homolog or ortholog thereof, may be utilized as an immunogen in the generation of antibodies that immunospecifically bind these protein components.

[0161] Various procedures known within the art may be used for the production of polyclonal or monoclonal antibodies directed against a protein of the invention, or against derivatives, fragments, analogs homologs or orthologs thereof (see, for example, Antibodies: A Laboratory Manual, Harlow E, and Lane D, 1988, Cold Spring Harbor Laboratory Press, Cold Spring Harbor, N.Y., incorporated herein by reference). Some of these antibodies are discussed below.

[0162] Polyclonal Antibodies

[0163] For the production of polyclonal antibodies, various suitable host animals (e.g., rabbit, goat, mouse or other mammal) may be immunized by one or more injections with the native protein, a synthetic variant thereof, or a derivative of the foregoing. An appropriate immunogenic preparation can contain, for example, the naturally occurring immunogenic protein, a chemically synthesized polypeptide representing the immunogenic protein, or a recombinantly expressed immunogenic protein. Furthermore, the protein may be conjugated to a second protein known to be immunogenic in the mammal being immunized. Examples of such immunogenic proteins include but are not limited to keyhole limpet hemocyanin, serum albumin, bovine thyroglobulin, and soybean trypsin inhibitor. The preparation can further include an adjuvant. Various adjuvants used to increase the immunological response include, but are not limited to, Freund's (complete and incomplete), mineral gels (e.g., aluminum hydroxide), surface active substances (e.g., lysolecithin, pluronic polyols, polyanions, peptides, oil emulsions, dinitrophenol, etc.), adjuvants usable in humans such as Bacille Calmette-Guerin and Corynebacterium parvum, or similar immunostimulatory agents. Additional examples of adjuvants which can be employed include MPL-TDM adjuvant (monophosphoryl Lipid A, synthetic trehalose dicorynomycolate).

[0164] The polyclonal antibody molecules directed against the immunogenic protein can be isolated from the mammal (e.g., from the blood) and further purified by well known techniques, such as affinity chromatography using protein A or protein G, which provide primarily the IgG fraction of immune serum. Subsequently, or alternatively, the specific antigen that is the target of the immunoglobulin sought, or an epitope thereof, may be immobilized on a column to purify the immune specific antibody by immunoaffinity chromatography. Purification of immunoglobulins is discussed, for example, by D. Wilkinson (The Scientist, published by The Scientist, Inc., Philadelphia Pa., Vol. 14, No. 8 (Apr. 17, 2000), pp. 25-28).

[0165] Monoclonal Antibodies

[0166] The term “monoclonal antibody” (MAb) or “monoclonal antibody composition”, as used herein, refers to a population of antibody molecules that contain only one molecular species of antibody molecule consisting of a unique light chain gene product and a unique heavy chain gene product. In particular, the complementarity determining regions (CDRs) of the monoclonal antibody are identical in all the molecules of the population. MAbs thus contain an antigen binding site capable of immunoreacting with a particular epitope of the antigen characterized by a unique binding affinity for it.

[0167] Monoclonal antibodies can be prepared using hybridoma methods, such as those described by Kohler and Milstein, Nature, 256:495 (1975). In a hybridoma method, a mouse, hamster, or other appropriate host animal, is typically immunized with an immunizing agent to elicit lymphocytes that produce or are capable of producing antibodies that will specifically bind to the immunizing agent. Alternatively, the lymphocytes can be immunized in vitro.

[0168] The immunizing agent will typically include the protein antigen, a fragment thereof or a fusion protein thereof. Generally, either peripheral blood lymphocytes are used if cells of human origin are desired, or spleen cells or lymph node cells are used if non-human mammalian sources are desired. The lymphocytes are then fused with an immortalized cell line using a suitable fusing agent, such as polyethylene glycol, to form a hybridoma cell (Goding, MONOCLONAL ANTIBODIES: PRINCIPLES AND PRACTICE, Academic Press, (1986) pp. 59-103). Immortalized cell lines are usually transformed mammalian cells, particularly myeloma cells of rodent, bovine and human origin. Usually, rat or mouse myeloma cell lines are employed. The hybridoma cells can be cultured in a suitable culture medium that preferably contains one or more substances that inhibit the growth or survival of the unfused, immortalized cells. For example, if the parental cells lack the enzyme hypoxanthine guanine phosphoribosyl transferase (HGPRT or HPRT), the culture medium for the hybridomas typically will include hypoxanthine, aminopterin, and thymidine (“HAT medium”), which substances prevent the growth of HGPRT-deficient cells.

[0169] Preferred immortalized cell lines are those that fuse efficiently, support stable high level expression of antibody by the selected antibody-producing cells, and are sensitive to a medium such as HAT medium. More preferred immortalized cell lines are murine myeloma lines, which can be obtained, for instance, from the Salk Institute Cell Distribution Center, San Diego, Calif. and the American Type Culture Collection, Manassas, Va. Human myeloma and mouse-human heteromyeloma cell lines also have been described for the production of human monoclonal antibodies (Kozbor, J. Immunol., 133:3001 (1984); Brodeur et al., Monoclonal Antibody Production Techniques and Applications, Marcel Dekker, Inc., New York, (1987) pp. 51-63).

[0170] The culture medium in which the hybridoma cells are cultured can then be assayed for the presence of monoclonal antibodies directed against the antigen. Preferably, the binding specificity of monoclonal antibodies produced by the hybridoma cells is determined by immunoprecipitation or by an in vitro binding assay, such as radioimmunoassay (RIA) or enzyme-linked immunoabsorbent assay (ELISA). Such techniques and assays are known in the art. The binding affinity of the monoclonal antibody can, for example, be determined by the Scatchard analysis of Munson and Pollard, Anal. Biochem., 107:220 (1980). It is an objective, especially important in therapeutic applications of monoclonal antibodies, to identify antibodies having a high degree of specificity and a high binding affinity for the target antigen.

[0171] After the desired hybridoma cells are identified, the clones can be subcloned by limiting dilution procedures and grown by standard methods (Goding, 1986). Suitable culture media for this purpose include, for example, Dulbecco's Modified Eagle's Medium and RPMI-1640 medium. Alternatively, the hybridoma cells can be grown in vivo as ascites in a mammal. The monoclonal antibodies secreted by the subclones can be isolated or purified from the culture medium or ascites fluid by conventional immunoglobulin purification procedures such as, for example, protein A-Sepharose, hydroxylapatite chromatography, gel electrophoresis, dialysis, or affinity chromatography.

[0172] The monoclonal antibodies can also be made by recombinant DNA methods, such as those described in U.S. Pat. No. 4,816,567. DNA encoding the monoclonal antibodies of the invention can be readily isolated and sequenced using conventional procedures (e.g., by using oligonucleotide probes that are capable of binding specifically to genes encoding the heavy and light chains of murine antibodies). The hybridoma cells of the invention serve as a preferred source of such DNA. Once isolated, the DNA can be placed into expression vectors, which are then transfected into host cells such as simian COS cells, Chinese hamster ovary (CHO) cells, or myeloma cells that do not otherwise produce immunoglobulin protein, to obtain the synthesis of monoclonal antibodies in the recombinant host cells. The DNA also can be modified, for example, by substituting the coding sequence for human heavy and light chain constant domains in place of the homologous murine sequences (U.S. Pat. No. 4,816,567; Morrison, Nature 368, 812-13 (1994)) or by covalently joining to the immunoglobulin coding sequence all or part of the coding sequence for a non-immunoglobulin polypeptide. Such a non-immunoglobulin polypeptide can be substituted for the constant domains of an antibody of the invention, or can be substituted for the variable domains of one antigen-combining site of an antibody of the invention to create a chimeric bivalent antibody.

[0173] Humanized Antibodies

[0174] The antibodies directed against the protein antigens of the invention can further comprise humanized antibodies or human antibodies. These antibodies are suitable for administration to humans without engendering an immune response by the human against the administered immunoglobulin. Humanized forms of antibodies are chimeric immunoglobulins, immunoglobulin chains or fragments thereof (such as Fv, Fab, Fab′, F(ab′)₂ or other antigen-binding subsequences of antibodies) that are principally comprised of the sequence of a human immunoglobulin, and contain minimal sequence derived from a non-human immunoglobulin. Humanization can be performed following the method of Winter and co-workers (Jones et al., Nature, 321:522-525 (1986); Riechmann et al., Nature, 332:323-327 (1988); Verhoeyen et al., Science, 239:1534-1536 (1988)), by substituting rodent CDRs or CDR sequences for the corresponding sequences of a human antibody. (See also U.S. Pat. No. 5,225,539.) In some instances, Fᵥ framework residues of the human immunoglobulin are replaced by corresponding non-human residues. Humanized antibodies can also comprise residues which are found neither in the recipient antibody nor in the imported CDR or framework sequences. In general, the humanized antibody will comprise substantially all of at least one, and typically two, variable domains, in which all or substantially all of the CDR regions correspond to those of a non-human immunoglobulin and all or substantially all of the framework regions are those of a human immunoglobulin consensus sequence. The humanized antibody optimally also will comprise at least a portion of an immunoglobulin constant region (Fc), typically that of a human immunoglobulin (Jones et al., 1986; Riechmann et al., 1988; and Presta, Curr. Op. Struct. Biol., 2:593-596 (1992)).

[0175] Human Antibodies

[0176] Fully human antibodies essentially relate to antibody molecules in which the entire sequence of both the light chain and the heavy chain, including the CDRs, arise from human genes. Such antibodies are termed “human antibodies”, or “fully human antibodies” herein. Human monoclonal antibodies can be prepared by the trioma technique; the human B-cell hybridoma technique (see Kozbor, et al., 1983 Immunol Today 4: 72) and the EBV hybridoma technique to produce human monoclonal antibodies (see Cole, et al., 1985 In: MONOCLONAL ANTIBODIES AND CANCER THERAPY, Alan R. Liss, Inc., pp. 77-96). Human monoclonal antibodies may be utilized in the practice of the present invention and may be produced by using human hybridomas (see Cote, et al., 1983. Proc Natl Acad Sci USA 80: 2026-2030) or by transforming human B-cells with Epstein Barr Virus in vitro (see Cole, et al., 1985 In: MONOCLONAL ANTIBODIES AND CANCER THERAPY, Alan R. Liss, Inc., pp. 77-96). In addition, human antibodies can also be produced using additional techniques, including phage display libraries (Hoogenboom and Winter, J. Mol. Biol., 227:381 (1991); Marks et al., J. Mol. Biol., 222:581 (1991)). Similarly, human antibodies can be made by introducing human immunoglobulin loci into transgenic animals. For example, mice in which the endogenous immunoglobulin genes have been partially or completely inactivated. Upon challenge, human antibody production is observed, which closely resembles that seen in humans in all respects, including gene rearrangement, assembly, and antibody repertoire. This approach is described, for example, in U.S. Pat. Nos. 5,545,807; 5,545,806; 5,569,825; 5,625,126; 5,633,425; 5,661,016, and in Marks et al. (Bio/Technology 10, 779-783 (1992)); Lonberg et al. (Nature 368 856-859 (1994)); Morrison (Nature 368, 812-13 (1994)); Fishwild et al, (Nature Biotechnology 14, 845-51 (1996)); Neuberger (Nature Biotechnology 14, 826 (1996)); and Lonberg and Huszar (Intern. Rev. Immunol. 13 65-93 (1995)).

[0177] Human antibodies may additionally be produced using transgenic nonhuman animals which are modified so as to produce fully human antibodies rather than the animal's endogenous antibodies in response to challenge by an antigen. (See PCT publication WO94/02602). The endogenous genes encoding the heavy and light immunoglobulin chains in the nonhuman host have been incapacitated, and active loci encoding human heavy and light chain immunoglobulins are inserted into the host's genome. The human genes are incorporated, for example, using yeast artificial chromosomes containing the requisite human DNA segments. An animal which provides all the desired modifications is then obtained as progeny by crossbreeding intermediate transgenic animals containing fewer than the full complement of the modifications. The preferred embodiment of such a nonhuman animal is a mouse, and is termed the Xenomouse™ as disclosed in PCT publications WO 96/33735 and WO 96/34096. This animal produces B cells which secrete fully human immunoglobulins. The antibodies can be obtained directly from the animal after immunization with an immunogen of interest, as, for example, a preparation of a polyclonal antibody, or alternatively from immortalized B cells derived from the animal, such as hybridomas producing monoclonal antibodies. Additionally, the genes encoding the immunoglobulins with human variable regions can be recovered and expressed to obtain the antibodies directly, or can be further modified to obtain analogs of antibodies such as, for example, single chain Fᵥ molecules.

[0178] An example of a method of producing a nonhuman host, exemplified as a mouse, lacking expression of an endogenous immunoglobulin heavy chain is disclosed in U.S. Pat. No. 5,939,598. It can be obtained by a method including deleting the J segment genes from at least one endogenous heavy chain locus in an embryonic stem cell to prevent rearrangement of the locus and to prevent formation of a transcript of a rearranged immunoglobulin heavy chain locus, the deletion being effected by a targeting vector containing a gene encoding a selectable marker; and producing from the embryonic stem cell a transgenic mouse whose somatic and germ cells contain the gene encoding the selectable marker.

[0179] A method for producing an antibody of interest, such as a human antibody, is disclosed in U.S. Pat. No. 5,916,771. It includes introducing an expression vector that contains a nucleotide sequence encoding a heavy chain into one mammalian host cell in culture, introducing an expression vector containing a nucleotide sequence encoding a light chain into another mammalian host cell, and fusing the two cells to form a hybrid cell. The hybrid cell expresses an antibody containing the heavy chain and the light chain.

[0180] In a further improvement on this procedure, a method for identifying a clinically relevant epitope on an immunogen, and a correlative method for selecting an antibody that binds immunospecifically to the relevant epitope with high affinity, are disclosed in PCT publication WO 99/53049.

[0181] F_{ab} Fragments and Single Chain Antibodies

[0182] According to the invention, techniques can be adapted for the production of single-chain antibodies specific to an antigenic protein of the invention (see e.g., U.S. Pat. No. 4,946,778). In addition, methods can be adapted for the construction of F_{ab} expression libraries (see e.g., Huse, et al., 1989 Science 246: 1275-1281) to allow rapid and effective identification of monoclonal F_{ab} fragments with the desired specificity for a protein or derivatives, fragments, analogs or homologs thereof. Antibody fragments that contain the idiotypes to a protein antigen may be produced by techniques known in the art including, but not limited to: (i) an F(ab)₂ fragment produced by pepsin digestion of an antibody molecule; (ii) an F_{ab} fragment generated by reducing the disulfide bridges of an F_{(ab′)2} fragment; (iii) an F_{ab} fragment generated by the treatment of the antibody molecule with papain and a reducing agent and (iv) Fᵥ fragments.

[0183] Bispecific Antibodies

[0184] Bispecific antibodies are monoclonal, preferably human or humanized, antibodies that have binding specificities for at least two different antigens. In the present case, one of the binding specificities is for an antigenic protein of the invention. The second binding target is any other antigen, and advantageously is a cell-surface protein or receptor or receptor subunit.

[0185] Methods for making bispecific antibodies are known in the art. Traditionally, the recombinant production of bispecific antibodies is based on the co-expression of two immunoglobulin heavy-chain/light-chain pairs, where the two heavy chains have different specificities (Milstein and Cuello, Nature, 305:537-539 (1983)). Because of the random assortment of immunoglobulin heavy and light chains, these hybridomas (quadromas) produce a potential mixture of ten different antibody molecules, of which only one has the correct bispecific structure. The purification of the correct molecule is usually accomplished by affinity chromatography. Similar procedures are disclosed in WO 93/08829, published 13 May 1993, and in Traunecker et al., EMBO J., 10:3655-3659 (1991).

[0186] Antibody variable domains with the desired binding specificities (antibody-antigen combining sites) can be fused to immunoglobulin constant domain sequences. The fusion preferably is with an immunoglobulin heavy-chain constant domain, comprising at least part of the hinge, CH2, and CH3 regions. It is preferred to have the first heavy-chain constant region (CH1) containing the site necessary for light-chain binding present in at least one of the fusions. DNAs encoding the immunoglobulin heavy-chain fusions and, if desired, the immunoglobulin light chain, are inserted into separate expression vectors, and are co-transfected into a suitable host organism. For further details of generating bispecific antibodies see, for example, Suresh et al., Methods in Enzymology, 121:210 (1986). According to another approach described in WO 96/27011, the interface between a pair of antibody molecules can be engineered to maximize the percentage of heterodimers that are recovered from recombinant cell culture. The preferred interface comprises at least a part of the CH3 region of an antibody constant domain. In this method, one or more small amino acid side chains from the interface of the first antibody molecule are replaced with larger side chains (e.g., tyrosine or tryptophan). Compensatory “cavities” of identical or similar size to the large side chain(s) are created on the interface of the second antibody molecule by replacing large amino acid side chains with smaller ones (e.g., alanine or threonine). This provides a mechanism for increasing the yield of the heterodimer over other unwanted end-products such as homodimers.

[0187] Bispecific antibodies can be prepared as full length antibodies or antibody fragments (e.g., F(ab′)₂ bispecific antibodies). Techniques for generating bispecific antibodies from antibody fragments have been described in the literature. For example, bispecific antibodies can be prepared using chemical linkage. Brennan et al., Science 229:81 (1985) describe a procedure wherein intact antibodies are proteolytically cleaved to generate F(ab′)₂ fragments. These fragments are reduced in the presence of the dithiol complexing agent sodium arsenite to stabilize vicinal dithiols and prevent intermolecular disulfide formation. The Fab′ fragments generated are then converted to thionitrobenzoate (TNB) derivatives. One of the Fab′-TNB derivatives is then reconverted to the Fab′-thiol by reduction with mercaptoethylamine and is mixed with an equimolar amount of the other Fab′-TNB derivative to form the bispecific antibody. The bispecific antibodies produced can be used as agents for the selective immobilization of enzymes.

[0188] Additionally, Fab′ fragments can be directly recovered from E. coli and chemically coupled to form bispecific antibodies. Shalaby et al., J. Exp. Med. 175:217-225 (1992) describe the production of a fully humanized bispecific antibody F(ab′)₂ molecule. Each Fab′ fragment was separately secreted from E. coli and subjected to directed chemical coupling in vitro to form the bispecific antibody. The bispecific antibody thus formed was able to bind to cells overexpressing the ErbB2 receptor and normal human T cells, as well as trigger the lytic activity of human cytotoxic lymphocytes against human breast tumor targets. Various techniques for making and isolating bispecific antibody fragments directly from recombinant cell culture have also been described. For example, bispecific antibodies have been produced using leucine zippers. Kostelny et al., J. Immunol. 148 (5):1547-1553 (1992). The leucine zipper peptides from the Fos and Jun proteins were linked to the Fab′ portions of two different antibodies by gene fusion. The antibody homodimers were reduced at the hinge region to form monomers and then re-oxidized to form the antibody heterodimers. This method can also be utilized for the production of antibody homodimers. The “diabody” technology described by Hollinger et al., Proc. Natl. Acad. Sci. USA 90:6444-6448 (1993) has provided an alternative mechanism for making bispecific antibody fragments. The fragments comprise a heavy-chain variable domain (V_{H}) connected to a light-chain variable domain (V_{L}) by a linker that is too short to allow pairing between the two domains on the same chain. Accordingly, the V_{H} and V_{L} domains of one fragment are forced to pair with the complementary V_{L} and V_{H} domains of another fragment, thereby forming two antigen-binding sites. Another strategy for making bispecific antibody fragments by the use of single-chain Fᵥ (sFv) dimers has also been reported. See, Gruber et al., J. Immunol. 152:5368 (1994).

[0189] Antibodies with more than two valencies are contemplated. For example, trispecific antibodies can be prepared. Tutt et al., J. Immunol. 147:60 (1991).

[0190] Exemplary bispecific antibodies can bind to two different epitopes, at least one of which originates in the protein antigen of the invention. Alternatively, an anti-antigenic arm of an immunoglobulin molecule can be combined with an arm which binds to a triggering molecule on a leukocyte such as a T-cell receptor molecule (e.g., CD2, CD3, CD28, or B7), or Fc receptors for IgG (FcγR), such as FcγRI (CD64), FcγRII (CD32) and FcγRIII (CD16) so as to focus cellular defense mechanisms to the cell expressing the particular antigen. Bispecific antibodies can also be used to direct cytotoxic agents to cells which express a particular antigen. These antibodies possess an antigen-binding arm and an arm which binds a cytotoxic agent or a radionuclide chelator, such as EOTUBE, DPTA, DOTA, or TETA. Another bispecific antibody of interest binds the protein antigen described herein and further binds tissue factor (TF).

[0191] Heteroconjugate Antibodies

[0192] Heteroconjugate antibodies are also within the scope of the present invention. Heteroconjugate antibodies are composed of two covalently joined antibodies. Such antibodies have, for example, been proposed to target immune system cells to unwanted cells (U.S. Pat. No. 4,676,980), and for treatment of HIV infection (WO 91/00360; WO 92/200373; EP 03089). It is contemplated that the antibodies can be prepared in vitro using known methods in synthetic protein chemistry, including those involving crosslinking agents. For example, immunotoxins can be constructed using a disulfide exchange reaction or by forming a thioether bond. Examples of suitable reagents for this purpose include iminothiolate and methyl-4-mercaptobutyrimidate and those disclosed, for example, in U.S. Pat. No. 4,676,980.

[0193] Effector Function Engineering

[0194] It can be desirable to modify the antibody of the invention with respect to effector function, so as to enhance, e.g., the effectiveness of the antibody in treating cancer. For example, cysteine residue(s) can be introduced into the Fc region, thereby allowing interchain disulfide bond formation in this region. The homodimeric antibody thus generated can have improved internalization capability and/or increased complement-mediated cell killing and antibody-dependent cellular cytotoxicity (ADCC). See Caron et al., J. Exp Med., 176: 1191-1195 (1992) and Shopes, J. Immunol., 148: 2918-2922 (1992). Homodimeric antibodies with enhanced anti-tumor activity can also be prepared using heterobifunctional cross-linkers as described in Wolff et al. Cancer Research, 53: 2560-2565 (1993). Alternatively, an antibody can be engineered that has dual Fc regions and can thereby have enhanced complement lysis and ADCC capabilities. See Stevenson et al., Anti-Cancer Drug Design, 3: 219-230 (1989).

[0195] Immunoconjugates

[0196] The invention also pertains to immunoconjugates comprising an antibody conjugated to a cytotoxic agent such as a chemotherapeutic agent, toxin (e.g., an enzymatically active toxin of bacterial, fungal, plant, or animal origin, or fragments thereof), or a radioactive isotope (i.e., a radioconjugate).

[0197] Chemotherapeutic agents useful in the generation of such immunoconjugates have been described above. Enzymatically active toxins and fragments thereof that can be used include diphtheria A chain, nonbinding active fragments of diphtheria toxin, exotoxin A chain (from Pseudomonas aeruginosa), ricin A chain, abrin A chain, modeccin A chain, alpha-sarcin, Aleurites fordii proteins, dianthin proteins, Phytolaca americana proteins (PAPI, PAPII, and PAP-S), momordica charantia inhibitor, curcin, crotin, sapaonaria officinalis inhibitor, gelonin, mitogellin, restrictocin, phenomycin, enomycin, and the tricothecenes. A variety of radionuclides are available for the production of radioconjugated antibodies. Examples include ²¹²Bi, ¹³¹I, ¹³¹In, ⁹⁰Y, and ¹⁸⁶Re.

[0198] Conjugates of the antibody and cytotoxic agent are made using a variety of bifunctional protein-coupling agents such as N-succinimidyl-3-(2-pyridyldithiol)propionate (SPDP), iminothiolane (IT), bifunctional derivatives of imidoesters (such as dimethyl adipimidate HCL), active esters (such as disuccinimidyl suberate), aldehydes (such as glutareldehyde), bis-azido compounds (such as bis(p-azidobenzoyl)hexanediamine), bis-diazonium derivatives (such as bis-(p-diazoniumbenzoyl)-ethylenediamine), diisocyanates (such as tolyene 2,6-diisocyanate), and bis-active fluorine compounds (such as 1,5-difluoro-2,4-dinitrobenzene). For example, a ricin immunotoxin can be prepared as described in Vitetta et al., Science, 238: 1098 (1987). Carbon-14-labeled 1-isothiocyanatobenzyl-3-methyldiethylene triaminepentaacetic acid (MX-DTPA) is an exemplary chelating agent for conjugation of radionucleotide to the antibody. See WO94/11026.

[0199] In another embodiment, the antibody can be conjugated to a “receptor” (such streptavidin) for utilization in tumor pretargeting wherein the antibody-receptor conjugate is administered to the patient, followed by removal of unbound conjugate from the circulation using a clearing agent and then administration of a “ligand” (e.g., avidin) that is in turn conjugated to a cytotoxic agent.

[0200] Immunoliposomes

[0201] The antibodies disclosed herein can also be formulated as immunoliposomes. Liposomes containing the antibody are prepared by methods known in the art, such as described in Epstein et al., Proc. Natl. Acad. Sci. USA, 82: 3688 (1985); Hwang et al., Proc. Natl. Acad. Sci. USA, 77: 4030 (1980); and U.S. Pat. Nos. 4,485,045 and 4,544,545. Liposomes with enhanced circulation time are disclosed in U.S. Pat. No. 5,013,556.

[0202] Particularly useful liposomes can be generated by the reverse-phase evaporation method with a lipid composition comprising phosphatidylcholine, cholesterol, and PEG-derivatized phosphatidylethanolamine (PEG-PE). Liposomes are extruded through filters of defined pore size to yield liposomes with the desired diameter. Fab′ fragments of the antibody of the present invention can be conjugated to the liposomes as described in Martin et al., _J. Biol. Chem., 257: 286-288 (1982) via a disulfide-interchange reaction. A chemotherapeutic agent (such as Doxorubicin) is optionally contained within the liposome. See Gabizon et al., J. National Cancer Inst., 81 (19): 1484 (1989).

[0203] Diagnostic Applications of Antibodies Directed Against the Proteins of the Invention

[0204] In one embodiment, methods for the screening of antibodies that possess the desired specificity include, but are not limited to, enzyme linked immunosorbent assay (ELISA) and other immunologically mediated techniques known within the art. In a specific embodiment, selection of antibodies that are specific to a particular domain of an NOVX protein is facilitated by generation of hybridomas that bind to the fragment of an NOVX protein possessing such a domain. Thus, antibodies that are specific for a desired domain within an NOVX protein, or derivatives, fragments, analogs or homologs thereof, are also provided herein.

[0205] Antibodies directed against a NOVX protein of the invention may be used in methods known within the art relating to the localization and/or quantitation of a NOVX protein (e.g., for use in measuring levels of the NOVX protein within appropriate physiological samples, for use in diagnostic methods, for use in imaging the protein, and the like). In a given embodiment, antibodies specific to a NOVX protein, or derivative, fragment, analog or homolog thereof, that contain the antibody derived antigen binding domain, are utilized as pharmacologically active compounds (referred to hereinafter as “Therapeutics”).

[0206] An antibody specific for a NOVX protein of the invention (e.g. a monoclonal antibody or a polyclonal antibody) can be used to isolate a NOVX polypeptide by standard techniques, such as immunoaffinity, chromatography or immunoprecipitation. An antibody to a NOVX polypeptide can facilitate the purification of a natural NOVX antigen from cells, or of a recombinantly produced NOVX antigen expressed in host cells. Moreover, such an anti-NOVX antibody can be used to detect the antigenic NOVX protein (e.g., in a cellular lysate or cell supernatant) in order to evaluate the abundance and pattern of expression of the antigenic NOVX protein. Antibodies directed against a NOVX protein can be used diagnostically to monitor protein levels in tissue as part of a clinical testing procedure, e.g., to, for example, determine the efficacy of a given treatment regimen. Detection can be facilitated by coupling (ie., physically linking) the antibody to a detectable substance. Examples of detectable substances include various enzymes, prosthetic groups, fluorescent materials, luminescent materials, bioluminescent materials, and radioactive materials. Examples of suitable enzymes include horseradish peroxidase, alkaline phosphatase, β-galactosidase, or acetylcholinesterase; examples of suitable prosthetic group complexes include streptavidin/biotin and avidin/biotin; examples of suitable fluorescent materials include umbelliferone, fluorescein, fluorescein isothiocyanate, rhodamine, dichlorotriazinylamine fluorescein, dansyl chloride or phycoerythrin; an example of a luminescent material includes luminol; examples of bioluminescent materials include luciferase, luciferin, and aequorin, and examples of suitable radioactive material include ¹²⁵I, ¹³¹I, ³⁵S or ³H.

[0207] Antibody Therapeutics

[0208] Antibodies of the invention, including polyclonal, monoclonal, humanized and fully human antibodies, may used as therapeutic agents. Such agents will generally be employed to treat or prevent a disease or pathology in a subject. An antibody preparation, preferably one having high specificity and high affinity for its target antigen, is administered to the subject and will generally have an effect due to its binding with the target. Such an effect may be one of two kinds, depending on the specific nature of the interaction between the given antibody molecule and the target antigen in question. In the first instance, administration of the antibody may abrogate or inhibit the binding of the target with an endogenous ligand to which it naturally binds. In this case, the antibody binds to the target and masks a binding site of the naturally occurring ligand, wherein the ligand serves as an effector molecule. Thus the receptor mediates a signal transduction pathway for which ligand is responsible. Alternatively, the effect may be one in which the antibody elicits a physiological result by virtue of binding to an effector binding site on the target molecule. In this case the target, a receptor having an endogenous ligand that may be absent or defective in the disease or pathology, binds the antibody as a surrogate effector ligand, initiating a receptor-based signal transduction event by the receptor.

[0209] A therapeutically effective amount of an antibody of the invention relates generally to the amount needed to achieve a therapeutic objective. As noted above, this may be a binding interaction between the antibody and its target antigen that, in certain cases, interferes with the functioning of the target, and in other cases, promotes a physiological response. The amount required to be administered will furthermore depend on the binding affinity of the antibody for its specific antigen, and will also depend on the rate at which an administered antibody is depleted from the free volume other subject to which it is administered. Common ranges for therapeutically effective dosing of an antibody or antibody fragment of the invention may be, by way of nonlimiting example, from about 0.1 mg/kg body weight to about 50 mg/kg body weight. Common dosing frequencies may range, for example, from twice daily to once a week.

[0210] Pharmaceutical Compositions of Antibodies

[0211] Antibodies specifically binding a protein of the invention, as well as other molecules identified by the screening assays disclosed herein, can be administered for the treatment of various disorders in the form of pharmaceutical compositions. Principles and considerations involved in preparing such compositions, as well as guidance in the choice of components are provided, for example, in Remington: The Science And Practice Of Pharmacy 19th ed. (Alfonso R. Gennaro, et al., editors) Mack Pub. Co., Easton, Pa.: 1995; Drug Absorption Enhancement: Concepts, Possibilities, Limitations, And Trends, Harwood Academic Publishers, Langhorne, Pa., 1994; and Peptide And Protein Drug Delivery (Advances In Parenteral Sciences, Vol. 4), 1991, M. Dekker, New York.

[0212] If the antigenic protein is intracellular and whole antibodies are used as inhibitors, internalizing antibodies are preferred. However, liposomes can also be used to deliver the antibody, or an antibody fragment, into cells. Where antibody fragments are used, the smallest inhibitory fragment that specifically binds to the binding domain of the target protein is preferred. For example, based upon the variable-region sequences of an antibody, peptide molecules can be designed that retain the ability to bind the target protein sequence. Such peptides can be synthesized chemically and/or produced by recombinant DNA technology. See, e.g., Marasco et al., Proc. Natl. Acad. Sci. USA, 90: 7889-7893 (1993). The formulation herein can also contain more than one active compound as necessary for the particular indication being treated, preferably those with complementary activities that do not adversely affect each other. Alternatively, or in addition, the composition can comprise an agent that enhances its function, such as, for example, a cytotoxic agent, cytokine, chemotherapeutic agent, or growth-inhibitory agent. Such molecules are suitably present in combination in amounts that are effective for the purpose intended.

[0213] The active ingredients can also be entrapped in microcapsules prepared, for example, by coacervation techniques or by interfacial polymerization, for example, hydroxymethylcellulose or gelatin-microcapsules and poly-(methylmethacrylate) microcapsules, respectively, in colloidal drug delivery systems (for example, liposomes, albumin microspheres, microemulsions, nano-particles, and nanocapsules) or in macroemulsions.

[0214] The formulations to be used for in vivo administration must be sterile. This is readily accomplished by filtration through sterile filtration membranes.

[0215] Sustained-release preparations can be prepared. Suitable examples of sustained-release preparations include semipermeable matrices of solid hydrophobic polymers containing the antibody, which matrices are in the form of shaped articles, e.g., films, or microcapsules. Examples of sustained-release matrices include polyesters, hydrogels (for example, poly(2-hydroxyethyl-methacrylate), or poly(vinylalcohol)), polylactides (U.S. Pat. No. 3,773,919), copolymers of L-glutamic acid and γ ethyl-L-glutamate, non-degradable ethylene-vinyl acetate, degradable lactic acid-glycolic acid copolymers such as the LUPRON DEPOT™ (injectable microspheres composed of lactic acid-glycolic acid copolymer and leuprolide acetate), and poly-D-(−)-3-hydroxybutyric acid. While polymers such as ethylene-vinyl acetate and lactic acid-glycolic acid enable release of molecules for over 100 days, certain hydrogels release proteins for shorter time periods.

[0216] ELISA Assay

[0217] An agent for detecting an analyte protein is an antibody capable of binding to an analyte protein, preferably an antibody with a detectable label. Antibodies can be polyclonal, or more preferably, monoclonal. An intact antibody, or a fragment thereof (e.g., F_{ab} or F(ab)₂) can be used. The term “labeled”, with regard to the probe or antibody, is intended to encompass direct labeling of the probe or antibody by coupling (i.e., physically linking) a detectable substance to the probe or antibody, as well as indirect labeling of the probe or antibody by reactivity with another reagent that is directly labeled. Examples of indirect labeling include detection of a primary antibody using a fluorescently-labeled secondary antibody and end-labeling of a DNA probe with biotin such that it can be detected with fluorescently-labeled streptavidin. The term “biological sample” is intended to include tissues, cells and biological fluids isolated from a subject, as well as tissues, cells and fluids present within a subject. Included within the usage of the term “biological sample”, therefore, is blood and a fraction or component of blood including blood serum, blood plasma, or lymph. That is, the detection method of the invention can be used to detect an analyte mRNA, protein, or genomic DNA in a biological sample in vitro as well as in vivo. For example, in vitro techniques for detection of an analyte mRNA include Northern hybridizations and in situ hybridizations. In vitro techniques for detection of an analyte protein include enzyme linked immunosorbent assays (ELISAs), Western blots, immunoprecipitations, and immunofluorescence. In vitro techniques for detection of an analyte genomic DNA include Southern hybridizations. Procedures for conducting immunoassays are described, for example in “ELISA: Theory and Practice: Methods in Molecular Biology”, Vol. 42, J. R. Crowther (Ed.) Human Press, Totowa, N.J., 1995; “Immunoassay”, E. Diamandis and T. Christopoulus, Academic Press, Inc., San Diego, Calif., 1996; and “Practice and Theory of Enzyme Immunoassays”, P. Tijssen, Elsevier Science Publishers, Amsterdam, 1985. Furthermore, in vivo techniques for detection of an analyte protein include introducing into a subject a labeled anti-an analyte protein antibody. For example, the antibody can be labeled with a radioactive marker whose presence and location in a subject can be detected by standard imaging techniques.

NOVX Recombinant Expression Vectors and Host Cells

[0218] Another aspect of the invention pertains to vectors, preferably expression vectors, containing a nucleic acid encoding a NOVX protein, or derivatives, fragments, analogs or homologs thereof. As used herein, the term “vector” refers to a nucleic acid molecule capable of transporting another nucleic acid to which it has been linked. One type of vector is a “plasmid”, which refers to a circular double stranded DNA loop into which additional DNA segments can be ligated. Another type of vector is a viral vector, wherein additional DNA segments can be ligated into the viral genome. Certain vectors are capable of autonomous replication in a host cell into which they are introduced (e.g., bacterial vectors having a bacterial origin of replication and episomal mammalian vectors). Other vectors (e.g., non-episomal mammalian vectors) are integrated into the genome of a host cell upon introduction into the host cell, and thereby are replicated along with the host genome. Moreover, certain vectors are capable of directing the expression of genes to which they are operatively-linked. Such vectors are referred to herein as “expression vectors”. In general, useful expression vectors in recombinant DNA techniques are often in the form of plasmids. In the present specification, “plasmid” and “vector” can be used interchangeably as the plasmid is the most commonly used form of vector. However, the invention is intended to include such other forms of expression vectors, such as viral vectors (e.g., replication defective retroviruses, adenoviruses and adeno-associated viruses), which serve equivalent functions.

[0219] The recombinant expression vectors of the invention comprise a nucleic acid of the invention in a form suitable for expression of the nucleic acid in a host cell, which means that the recombinant expression vectors include one or more regulatory sequences, selected on the basis of the host cells to be used for expression, that is operatively-linked to the nucleic acid sequence to be expressed. Within a recombinant expression vector, “operably-linked” is intended to mean that the nucleotide sequence of interest is linked to the regulatory sequence(s) in a manner that allows for expression of the nucleotide sequence (e.g., in an in vitro transcription/translation system or in a host cell when the vector is introduced into the host cell).

[0220] The term “regulatory sequence” is intended to includes promoters, enhancers and other expression control elements (e.g., polyadenylation signals). Such regulatory sequences are described, for example, in Goeddel, GENE EXPRESSION TECHNOLOGY: METHODS IN ENZYMOLOGY 185, Academic Press, San Diego, Calif. (1990). Regulatory sequences include those that direct constitutive expression of a nucleotide sequence in many types of host cell and those that direct expression of the nucleotide sequence only in certain host cells (e.g., tissue-specific regulatory sequences). It will be appreciated by those skilled in the art that the design of the expression vector can depend on such factors as the choice of the host cell to be transformed, the level of expression of protein desired, etc. The expression vectors of the invention can be introduced into host cells to thereby produce proteins or peptides, including fusion proteins or peptides, encoded by nucleic acids as described herein (e.g., NOVX proteins, mutant forms of NOVX proteins, fusion proteins, etc.).

[0221] The recombinant expression vectors of the invention can be designed for expression of NOVX proteins in prokaryotic or eukaryotic cells. For example, NOVX proteins can be expressed in bacterial cells such as Escherichia coli, insect cells (using baculovirus expression vectors) yeast cells or mammalian cells. Suitable host cells are discussed further in Goeddel, GENE EXPRESSION TECHNOLOGY: METHODS IN ENZYMOLOGY 185, Academic Press, San Diego, Calif. (1990). Alternatively, the recombinant expression vector can be transcribed and translated in vitro, for example using T7 promoter regulatory sequences and T7 polymerase.

[0222] Expression of proteins in prokaryotes is most often carried out in Escherichia coli with vectors containing constitutive or inducible promoters directing the expression of either fusion or non-fusion proteins. Fusion vectors add a number of amino acids to a protein encoded therein, usually to the amino terminus of the recombinant protein. Such fusion vectors typically serve three purposes: (i) to increase expression of recombinant protein; (ii) to increase the solubility of the recombinant protein; and (iii) to aid in the purification of the recombinant protein by acting as a ligand in affinity purification. Often, in fusion expression vectors, a proteolytic cleavage site is introduced at the junction of the fusion moiety and the recombinant protein to enable separation of the recombinant protein from the fusion moiety subsequent to purification of the fusion protein. Such enzymes, and their cognate recognition sequences, include Factor Xa, thrombin and enterokinase. Typical fusion expression vectors include pGEX (Pharmacia Biotech Inc; Smith and Johnson, 1988. Gene 67: 31-40), pMAL (New England Biolabs, Beverly, Mass.) and pRIT5 (Pharmacia, Piscataway, N.J.) that fuse glutathione S-transferase (GST), maltose E binding protein, or protein A, respectively, to the target recombinant protein.

[0223] Examples of suitable inducible non-fusion E. coli expression vectors include pTrc (Amrann et al., (1988) Gene 69:301-315) and pET 1 d (Studier et al., GENE EXPRESSION TECHNOLOGY: METHODS IN ENZYMOLOGY 185, Academic Press, San Diego, Calif. (1990) 60-89).

[0224] One strategy to maximize recombinant protein expression in E. coli is to express the protein in a host bacteria with an impaired capacity to proteolytically cleave the recombinant protein. See, e.g., Gottesman, GENE EXPRESSION TECHNOLOGY: METHODS IN ENZYMOLOGY 185, Academic Press, San Diego, Calif. (1990) 119-128. Another strategy is to alter the nucleic acid sequence of the nucleic acid to be inserted into an expression vector so that the individual codons for each amino acid are those preferentially utilized in E. coli (see, e.g., Wada, et al., 1992. Nucl. Acids Res. 20: 2111-2118). Such alteration of nucleic acid sequences of the invention can be carried out by standard DNA synthesis techniques.

[0225] In another embodiment, the NOVX expression vector is a yeast expression vector. Examples of vectors for expression in yeast Saccharomyces cerivisae include pYepSec1 (Baldari, et al., 1987. EMBO J. 6: 229-234), pMFa (Kurjan and Herskowitz, 1982. Cell 30: 933-943), pJRY88 (Schultz et al., 1987. Gene 54: 113-123), pYES2 (Invitrogen Corporation, San Diego, Calif.), and picZ (InVitrogen Corp, San Diego, Calif.).

[0226] Alternatively, NOVX can be expressed in insect cells using baculovirus expression vectors. Baculovirus vectors available for expression of proteins in cultured insect cells (e.g., SF9 cells) include the pAc series (Smith, et al., 1983. Mol. Cell. Biol. 3: 2156-2165) and the pVL series (Lucklow and Summers, 1989. Virology 170: 31-39).

[0227] In yet another embodiment, a nucleic acid of the invention is expressed in mammalian cells using a mammalian expression vector. Examples of mammalian expression vectors include pCDM8 (Seed, 1987. Nature 329: 840) and pMT2PC (Kaufman, et al., 1987. EMBO J. 6: 187-195). When used in mammalian cells, the expression vector's control functions are often provided by viral regulatory elements. For example, commonly used promoters are derived from polyoma, adenovirus 2, cytomegalovirus, and simian virus 40. For other suitable expression systems for both prokaryotic and eukaryotic cells see, e.g., Chapters 16 and 17 of Sambrook, et al., MOLECULAR CLONING: A LABORATORY MANUAL. 2nd ed., Cold Spring Harbor Laboratory, Cold Spring Harbor Laboratory Press, Cold Spring Harbor, N.Y., 1989. In another embodiment, the recombinant mammalian expression vector is capable of directing expression of the nucleic acid preferentially in a particular cell type (e.g., tissue-specific regulatory elements are used to express the nucleic acid). Tissue-specific regulatory elements are known in the art. Non-limiting examples of suitable tissue-specific promoters include the albumin promoter (liver-specific; Pinkert, et al., 1987. Genes Dev. 1: 268-277), lymphoid-specific promoters (Calame and Eaton, 1988. Adv. Immunol. 43: 235-275), in particular promoters of T cell receptors (Winoto and Baltimore, 1989. EMBO J. 8: 729-733) and immunoglobulins (Banerji, et al., 1983. Cell 33: 729-740; Queen and Baltimore, 1983. Cell 33: 741-748), neuron-specific promoters (e.g., the neurofilament promoter; Byrne and Ruddle, 1989. Proc. Natl. Acad. Sci. USA 86: 5473-5477), pancreas-specific promoters (Edlund, et al., 1985. Science 230: 912-916), and mammary gland-specific promoters (e.g., milk whey promoter; U.S. Pat. No. 4,873,316 and European Application Publication No. 264,166). Developmentally-regulated promoters are also encompassed, e.g., the murine hox promoters (Kessel and Gruss, 1990. Science 249: 374-379) and the α-fetoprotein promoter (Campes and Tilghman, 1989. Genes Dev. 3: 537-546).

[0228] The invention further provides a recombinant expression vector comprising a DNA molecule of the invention cloned into the expression vector in an antisense orientation. That is, the DNA molecule is operatively-linked to a regulatory sequence in a manner that allows for expression (by transcription of the DNA molecule) of an RNA molecule that is antisense to NOVX mRNA. Regulatory sequences operatively linked to a nucleic acid cloned in the antisense orientation can be chosen that direct the continuous expression of the antisense RNA molecule in a variety of cell types, for instance viral promoters and/or enhancers, or regulatory sequences can be chosen that direct constitutive, tissue specific or cell type specific expression of antisense RNA. The antisense expression vector can be in the form of a recombinant plasmid, phagemid or attenuated virus in which antisense nucleic acids are produced under the control of a high efficiency regulatory region, the activity of which can be determined by the cell type into which the vector is introduced. For a discussion of the regulation of gene expression using antisense genes see, e.g., Weintraub, et al., “Antisense RNA as a molecular tool for genetic analysis,” Reviews-Trends in Genetics, Vol. 1 (1) 1986. Another aspect of the invention pertains to host cells into which a recombinant expression vector of the invention has been introduced. The terms “host cell” and “recombinant host cell” are used interchangeably herein. It is understood that such terms refer not only to the particular subject cell but also to the progeny or potential progeny of such a cell. Because certain modifications may occur in succeeding generations due to either mutation or environmental influences, such progeny may not, in fact, be identical to the parent cell, but are still included within the scope of the term as used herein.

[0229] A host cell can be any prokaryotic or eukaryotic cell. For example, NOVX protein can be expressed in bacterial cells such as E. coli, insect cells, yeast or mammalian cells (such as Chinese hamster ovary cells (CHO) or COS cells). Other suitable host cells are known to those skilled in the art.

[0230] Vector DNA can be introduced into prokaryotic or eukaryotic cells via conventional transformation or transfection techniques. As used herein, the terms “transformation” and “transfection” are intended to refer to a variety of art-recognized techniques for introducing foreign nucleic acid (e.g., DNA) into a host cell, including calcium phosphate or calcium chloride co-precipitation, DEAE-dextran-mediated transfection, lipofection, or electroporation. Suitable methods for transforming or transfecting host cells can be found in Sambrook, et al. (MOLECULAR CLONING: A LABORATORY MANUAL. 2nd ed., Cold Spring Harbor Laboratory, Cold Spring Harbor Laboratory Press, Cold Spring Harbor, N.Y., 1989), and other laboratory manuals.

[0231] For stable transfection of mammalian cells, it is known that, depending upon the expression vector and transfection technique used, only a small fraction of cells may integrate the foreign DNA into their genome. In order to identify and select these integrants, a gene that encodes a selectable marker (e.g., resistance to antibiotics) is generally introduced into the host cells along with the gene of interest. Various selectable markers include those that confer resistance to drugs, such as G418, hygromycin and methotrexate. Nucleic acid encoding a selectable marker can be introduced into a host cell on the same vector as that encoding NOVX or can be introduced on a separate vector. Cells stably transfected with the introduced nucleic acid can be identified by drug selection (e.g., cells that have incorporated the selectable marker gene will survive, while the other cells die).

[0232] A host cell of the invention, such as a prokaryotic or eukaryotic host cell in culture, can be used to produce (i.e., express) NOVX protein. Accordingly, the invention further provides methods for producing NOVX protein using the host cells of the invention. In one embodiment, the method comprises culturing the host cell of invention (into which a recombinant expression vector encoding NOVX protein has been introduced) in a suitable medium such that NOVX protein is produced. In another embodiment, the method further comprises isolating NOVX protein from the medium or the host cell.

Transgenic NOVX Animals

[0233] The host cells of the invention can also be used to produce non-human transgenic animals. For example, in one embodiment, a host cell of the invention is a fertilized oocyte or an embryonic stem cell into which NOVX protein-coding sequences have been introduced. Such host cells can then be used to create non-human transgenic animals in which exogenous NOVX sequences have been introduced into their genome or homologous recombinant animals in which endogenous NOVX sequences have been altered. Such animals are useful for studying the function and/or activity of NOVX protein and for identifying and/or evaluating modulators of NOVX protein activity. As used herein, a “transgenic animal” is a non-human animal, preferably a mammal, more preferably a rodent such as a rat or mouse, in which one or more of the cells of the animal includes a transgene. Other examples of transgenic animals include non-human primates, sheep, dogs, cows, goats, chickens, amphibians, etc. A transgene is exogenous DNA that is integrated into the genome of a cell from which a transgenic animal develops and that remains in the genome of the mature animal, thereby directing the expression of an encoded gene product in one or more cell types or tissues of the transgenic animal. As used herein, a “homologous recombinant animal” is a non-human animal, preferably a mammal, more preferably a mouse, in which an endogenous NOVX gene has been altered by homologous recombination between the endogenous gene and an exogenous DNA molecule introduced into a cell of the animal, e.g., an embryonic cell of the animal, prior to development of the animal.

[0234] A transgenic animal of the invention can be created by introducing a NOVX-encoding nucleic acid into the male pronuclei of a fertilized oocyte (e.g., by microinjection, retroviral infection) and allowing the oocyte to develop in a pseudopregnant female foster animal. The human NOVX cDNA sequences, ie., any one of SEQ ID NO:2n-1, wherein n is an integer between 1 and 85, can be introduced as a transgene into the genome of a non-human animal. Alternatively, a non-human homologue of the human NOVX gene, such as a mouse NOVX gene, can be isolated based on hybridization to the human NOVX cDNA (described further supra) and used as a transgene. Intronic sequences and polyadenylation signals can also be included in the transgene to increase the efficiency of expression of the transgene. A tissue-specific regulatory sequence(s) can be operably-linked to the NOVX transgene to direct expression of NOVX protein to particular cells. Methods for generating transgenic animals via embryo manipulation and microinjection, particularly animals such as mice, have become conventional in the art and are described, for example, in U.S. Pat. Nos. 4,736,866; 4,870,009; and 4,873,191; and Hogan, 1986. In: MANIPULATING THE MOUSE EMBRYO, Cold Spring Harbor Laboratory Press, Cold Spring Harbor, N.Y. Similar methods are used for production of other transgenic animals. A transgenic founder animal can be identified based upon the presence of the NOVX transgene in its genome and/or expression of NOVX mRNA in tissues or cells of the animals. A transgenic founder animal can then be used to breed additional animals carrying the transgene. Moreover, transgenic animals carrying a transgene-encoding NOVX protein can further be bred to other transgenic animals carrying other transgenes.

[0235] To create a homologous recombinant animal, a vector is prepared which contains at least a portion of a NOVX gene into which a deletion, addition or substitution has been introduced to thereby alter, e.g., functionally disrupt, the NOVX gene. The NOVX gene can be a human gene (e.g., the cDNA of any one of SEQ ID NO:2n-1, wherein n is an integer between 1 and 85), but more preferably, is a non-human homologue of a human NOVX gene. For example, a mouse homologue of human NOVX gene of SEQ ID NO:2n-1, wherein n is an integer between 1 and 85, can be used to construct a homologous recombination vector suitable for altering an endogenous NOVX gene in the mouse genome. In one embodiment, the vector is designed such that, upon homologous recombination, the endogenous NOVX gene is functionally disrupted (i.e., no longer encodes a functional protein; also referred to as a “knock out” vector).

[0236] Alternatively, the vector can be designed such that, upon homologous recombination, the endogenous NOVX gene is mutated or otherwise altered but still encodes functional protein (e.g., the upstream regulatory region can be altered to thereby alter the expression of the endogenous NOVX protein). In the homologous recombination vector, the altered portion of the NOVX gene is flanked at its 5′- and 3′-termini by additional nucleic acid of the NOVX gene to allow for homologous recombination to occur between the exogenous NOVX gene carried by the vector and an endogenous NOVX gene in an embryonic stem cell. The additional flanking NOVX nucleic acid is of sufficient length for successful homologous recombination with the endogenous gene. Typically, several kilobases of flanking DNA (both at the 5′- and 3′-termini) are included in the vector. See, e.g., Thomas, et al., 1987. Cell 51: 503 for a description of homologous recombination vectors. The vector is ten introduced into an embryonic stem cell line (e.g., by electroporation) and cells in which the introduced NOVX gene has homologously-recombined with the endogenous NOVX gene are selected. See, e.g., Li, et al., 1992. Cell 69: 915.

[0237] The selected cells are then injected into a blastocyst of an animal (e.g., a mouse) to form aggregation chimeras. See, e.g., Bradley, 1987. In: TERATOCARCINOMAS AND EMBRYONIC STEM CELLS: A PRACTICAL APPROACH, Robertson, ed. IRL, Oxford, pp. 113-152. A chimeric embryo can then be implanted into a suitable pseudopregnant female foster animal and the embryo brought to term. Progeny harboring the homologously-recombined DNA in their germ cells can be used to breed animals in which all cells of the animal contain the homologously-recombined DNA by germline transmission of the transgene. Methods for constructing homologous recombination vectors and homologous recombinant animals are described further in Bradley, 1991. Curr. Opin. Biotechnol. 2: 823-829; PCT International Publication Nos.: WO 90/11354; WO 91/01140; WO 92/0968; and WO 93/04169.

[0238] In another embodiment, transgenic non-humans animals can be produced that contain selected systems that allow for regulated expression of the transgene. One example of such a system is the cre/loxP recombinase system of bacteriophage P 1. For a description of the cre/loxP recombinase system, see, e.g., Lakso, et al., 1992. Proc. Natl. Acad. Sci. USA 89: 6232-6236. Another example of a recombinase system is the FLP recombinase system of Saccharomyces cerevisiae. See, O'Gorman, et al., 1991. Science 251:1351-1355. If a cre/loxP recombinase system is used to regulate expression of the transgene, animals containing transgenes encoding both the Cre recombinase and a selected protein are required. Such animals can be provided through the construction of “double” transgenic animals, e.g., by mating two transgenic animals, one containing a transgene encoding a selected protein and the other containing a transgene encoding a recombinase.

[0239] Clones of the non-human transgenic animals described herein can also be produced according to the methods described in Wilmut, et al., 1997. Nature 385: 810-813. In brief, a cell (e.g., a somatic cell) from the transgenic animal can be isolated and induced to exit the growth cycle and enter Go phase. The quiescent cell can then be fused, e.g., through the use of electrical pulses, to an enucleated oocyte from an animal of the same species from which the quiescent cell is isolated. The reconstructed oocyte is then cultured such that it develops to morula or blastocyte and then transferred to pseudopregnant female foster animal. The offspring borne of this female foster animal will be a clone of the animal from which the cell (e.g., the somatic cell) is isolated.

Pharmaceutical Compositions

[0240] The NOVX nucleic acid molecules, NOVX proteins, and anti-NOVX antibodies (also referred to herein as “active compounds”) of the invention, and derivatives, fragments, analogs and homologs thereof, can be incorporated into pharmaceutical compositions suitable for administration. Such compositions typically comprise the nucleic acid molecule, protein, or antibody and a pharmaceutically acceptable carrier. As used herein, “pharmaceutically acceptable carrier” is intended to include any and all solvents, dispersion media, coatings, antibacterial and antifungal agents, isotonic and absorption delaying agents, and the like, compatible with pharmaceutical administration. Suitable carriers are described in the most recent edition of Remington's Pharmaceutical Sciences, a standard reference text in the field, which is incorporated herein by reference. Preferred examples of such carriers or diluents include, but are not limited to, water, saline, finger's solutions, dextrose solution, and 5% human serum albumin. Liposomes and non-aqueous vehicles such as fixed oils may also be used. The use of such media and agents for pharmaceutically active substances is well known in the art. Except insofar as any conventional media or agent is incompatible with the active compound, use thereof in the compositions is contemplated. Supplementary active compounds can also be incorporated into the compositions.

[0241] A pharmaceutical composition of the invention is formulated to be compatible with its intended route of administration. Examples of routes of administration include parenteral, e.g., intravenous, intradermal, subcutaneous, oral (e.g., inhalation), transdermal (i.e., topical), transmucosal, and rectal administration. Solutions or suspensions used for parenteral, intradermal, or subcutaneous application can include the following components: a sterile diluent such as water for injection, saline solution, fixed oils, polyethylene glycols, glycerine, propylene glycol or other synthetic solvents; antibacterial agents such as benzyl alcohol or methyl parabens; antioxidants such as ascorbic acid or sodium bisulfite; chelating agents such as ethylenediaminetetraacetic acid (EDTA); buffers such as acetates, citrates or phosphates, and agents for the adjustment of tonicity such as sodium chloride or dextrose. The pH can be adjusted with acids or bases, such as hydrochloric acid or sodium hydroxide. The parenteral preparation can be enclosed in ampoules, disposable syringes or multiple dose vials made of glass or plastic.

[0242] Pharmaceutical compositions suitable for injectable use include sterile aqueous solutions (where water soluble) or dispersions and sterile powders for the extemporaneous preparation of sterile injectable solutions or dispersion. For intravenous administration, suitable carriers include physiological saline, bacteriostatic water, Cremophor EL™ (BASF, Parsippany, N.J.) or phosphate buffered saline (PBS). In all cases, the composition must be sterile and should be fluid to the extent that easy syringeability exists. It must be stable under the conditions of manufacture and storage and must be preserved against the contaminating action of microorganisms such as bacteria and fungi. The carrier can be a solvent or dispersion medium containing, for example, water, ethanol, polyol (for example, glycerol, propylene glycol, and liquid polyethylene glycol, and the like), and suitable mixtures thereof. The proper fluidity can be maintained, for example, by the use of a coating such as lecithin, by the maintenance of the required particle size in the case of dispersion and by the use of surfactants. Prevention of the action of microorganisms can be achieved by various antibacterial and antifungal agents, for example, parabens, chlorobutanol, phenol, ascorbic acid, thimerosal, and the like. In many cases, it will be preferable to include isotonic agents, for example, sugars, polyalcohols such as manitol, sorbitol, sodium chloride in the composition. Prolonged absorption of the injectable compositions can be brought about by including in the composition an agent that delays absorption, for example, aluminum monostearate and gelatin.

[0243] Sterile injectable solutions can be prepared by incorporating the active compound (e.g., a NOVX protein or anti-NOVX antibody) in the required amount in an appropriate solvent with one or a combination of ingredients enumerated above, as required, followed by filtered sterilization. Generally, dispersions are prepared by incorporating the active compound into a sterile vehicle that contains a basic dispersion medium and the required other ingredients from those enumerated above. In the case of sterile powders for the preparation of sterile injectable solutions, methods of preparation are vacuum drying and freeze-drying that yields a powder of the active ingredient plus any additional desired ingredient from a previously sterile-filtered solution thereof.

[0244] Oral compositions generally include an inert diluent or an edible carrier. They can be enclosed in gelatin capsules or compressed into tablets. For the purpose of oral therapeutic administration, the active compound can be incorporated with excipients and used in the form of tablets, troches, or capsules. Oral compositions can also be prepared using a fluid carrier for use as a mouthwash, wherein the compound in the fluid carrier is applied orally and swished and expectorated or swallowed. Pharmaceutically compatible binding agents, and/or adjuvant materials can be included as part of the composition. The tablets, pills, capsules, troches and the like can contain any of the following ingredients, or compounds of a similar nature: a binder such as microcrystalline cellulose, gum tragacanth or gelatin; an excipient such as starch or lactose, a disintegrating agent such as alginic acid, Primogel, or corn starch; a lubricant such as magnesium stearate or Sterotes; a glidant such as colloidal silicon dioxide; a sweetening agent such as sucrose or saccharin; or a flavoring agent such as peppermint, methyl salicylate, or orange flavoring.

[0245] For administration by inhalation, the compounds are delivered in the form of an aerosol spray from pressured container or dispenser that contains a suitable propellant, e.g., a gas such as carbon dioxide, or a nebulizer.

[0246] Systemic administration can also be by transmucosal or transdermal means. For transmucosal or transdermal administration, penetrants appropriate to the barrier to be permeated are used in the formulation. Such penetrants are generally known in the art, and include, for example, for transmucosal administration, detergents, bile salts, and fusidic acid derivatives. Transmucosal administration can be accomplished through the use of nasal sprays or suppositories. For transdermal administration, the active compounds are formulated into ointments, salves, gels, or creams as generally known in the art.

[0247] The compounds can also be prepared in the form of suppositories (e.g., with conventional suppository bases such as cocoa butter and other glycerides) or retention enemas for rectal delivery.

[0248] In one embodiment, the active compounds are prepared with carriers that will protect the compound against rapid elimination from the body, such as a controlled release formulation, including implants and microencapsulated delivery systems. Biodegradable, biocompatible polymers can be used, such as ethylene vinyl acetate, polyanhydrides, polyglycolic acid, collagen, polyorthoesters, and polylactic acid. Methods for preparation of such formulations will be apparent to those skilled in the art. The materials can also be obtained commercially from Alza Corporation and Nova Pharmaceuticals, Inc. Liposomal suspensions (including liposomes targeted to infected cells with monoclonal antibodies to viral antigens) can also be used as pharmaceutically acceptable carriers. These can be prepared according to methods known to those skilled in the art, for example, as described in U.S. Pat. No. 4,522,811. It is especially advantageous to formulate oral or parenteral compositions in dosage unit form for ease of administration and uniformity of dosage. Dosage unit form as used herein refers to physically discrete units suited as unitary dosages for the subject to be treated; each unit containing a predetermined quantity of active compound calculated to produce the desired therapeutic effect in association with the required pharmaceutical carrier. The specification for the dosage unit forms of the invention are dictated by and directly dependent on the unique characteristics of the active compound and the particular therapeutic effect to be achieved, and the limitations inherent in the art of compounding such an active compound for the treatment of individuals.

[0249] The nucleic acid molecules of the invention can be inserted into vectors and used as gene therapy vectors. Gene therapy vectors can be delivered to a subject by, for example, intravenous injection, local administration (see, e.g., U.S. Pat. No. 5,328,470) or by stereotactic injection (see, e.g., Chen, et al., 1994. Proc. Natl. Acad. Sci. USA 91: 3054-3057). The pharmaceutical preparation of the gene therapy vector can include the gene therapy vector in an acceptable diluent, or can comprise a slow release matrix in which the gene delivery vehicle is imbedded. Alternatively, where the complete gene delivery vector can be produced intact from recombinant cells, e.g., retroviral vectors, the pharmaceutical preparation can include one or more cells that produce the gene delivery system.

[0250] The pharmaceutical compositions can be included in a container, pack, or dispenser together with instructions for administration.

Screening and Detection Methods

[0251] The isolated nucleic acid molecules of the invention can be used to express NOVX protein (e.g., via a recombinant expression vector in a host cell in gene therapy applications), to detect NOVX mRNA (e.g., in a biological sample) or a genetic lesion in a NOVX gene, and to modulate NOVX activity, as described further, below. In addition, the NOVX proteins can be used to screen drugs or compounds that modulate the NOVX protein activity or expression as well as to treat disorders characterized by insufficient or excessive production of NOVX protein or production of NOVX protein forms that have decreased or aberrant activity compared to NOVX wild-type protein (e.g.; diabetes (regulates insulin release); obesity (binds and transport lipids); metabolic disturbances associated with obesity, the metabolic syndrome X as well as anorexia and wasting disorders associated with chronic diseases and various cancers, and infectious disease (possesses anti-microbial activity) and the various dyslipidemias. In addition, the anti-NOVX antibodies of the invention can be used to detect and isolate NOVX proteins and modulate NOVX activity. In yet a further aspect, the invention can be used in methods to influence appetite, absorption of nutrients and the disposition of metabolic substrates in both a positive and negative fashion. The invention further pertains to novel agents identified by the screening assays described herein and uses thereof for treatments as described, supra.

Screening Assays

[0252] The invention provides a method (also referred to herein as a “screening assay”) for identifying modulators, i.e., candidate or test compounds or agents (e.g., peptides, peptidomimetics, small molecules or other drugs) that bind to NOVX proteins or have a stimulatory or inhibitory effect on, e.g., NOVX protein expression or NOVX protein activity. The invention also includes compounds identified in the screening assays described herein.

[0253] In one embodiment, the invention provides assays for screening candidate or test compounds that bind to or modulate the activity of the membrane-bound form of a NOVX protein or polypeptide or biologically-active portion thereof. The test compounds of the invention can be obtained using any of the numerous approaches in combinatorial library methods known in the art, including: biological libraries; spatially addressable parallel solid phase or solution phase libraries; synthetic library methods requiring deconvolution; the “one-bead one-compound” library method; and synthetic library methods using affinity chromatography selection. The biological library approach is limited to peptide libraries, while the other four approaches are applicable to peptide, non-peptide oligomer or small molecule libraries of compounds. See, e.g., Lam, 1997. Anticancer Drug Design 12: 145.

[0254] A “small molecule” as used herein, is meant to refer to a composition that has a molecular weight of less than about 5 kD and most preferably less than about 4 kD. Small molecules can be, e.g., nucleic acids, peptides, polypeptides, peptidomimetics, carbohydrates, lipids or other organic or inorganic molecules. Libraries of chemical and/or biological mixtures, such as fungal, bacterial, or algal extracts, are known in the art and can be screened with any of the assays of the invention.

[0255] Examples of methods for the synthesis of molecular libraries can be found in the art, for example in: DeWitt, et al., 1993. Proc. Natl. Acad. Sci. U.S.A. 90: 6909; Erb, et al., 1994. Proc. Natl. Acad. Sci. U.S.A. 91: 11422; Zuckermann, et al., 1994. J. Med. Chem. 37: 2678; Cho, et al., 1993. Science 261: 1303; Carrell, et al., 1994. Angew. Chem. Int. Ed. Engl. 33: 2059; Carell, et al., 1994. Angew. Chem. Int. Ed. Engl. 33: 2061; and Gallop, et al., 1994. J. Med. Chem. 37:1233.

[0256] Libraries of compounds may be presented in solution (e.g., Houghten, 1992. Biotechniques 13: 412-421), or on beads (Lam, 1991. Nature 354: 82-84), on chips (Fodor, 1993. Nature 364: 555-556), bacteria (Ladner, U.S. Pat. No. 5,223,409), spores (Ladner, U.S. Pat. No. 5,233,409), plasmids (Cull, et al., 1992. Proc. Natl. Acad. Sci. USA 89: 1865-1869) or on phage (Scott and Smith, 1990. Science 249: 386-390; Devlin, 1990. Science 249: 404-406; Cwirla, et al., 1990. Proc. Natl. Acad. Sci. U.S.A. 87: 6378-6382; Felici, 1991. J. Mol. Biol. 222: 301-310; Ladner, U.S. Pat. No. 5,233,409.).

[0257] In one embodiment, an assay is a cell-based assay in which a cell which expresses a membrane-bound form of NOVX protein, or a biologically-active portion thereof, on the cell surface is contacted with a test compound and the ability of the test compound to bind to a NOVX protein determined. The cell, for example, can be of mammalian origin or a yeast cell. Determining the ability of the test compound to bind to the NOVX protein can be accomplished, for example, by coupling the test compound with a radioisotope or enzymatic label such that binding of the test compound to the NOVX protein or biologically-active portion thereof can be determined by detecting the labeled compound in a complex. For example, test compounds can be labeled with ¹²⁵I, ³⁵S, ¹⁴C, or ³H, either directly or indirectly, and the radioisotope detected by direct counting of radioemission or by scintillation counting. Alternatively, test compounds can be enzymatically-labeled with, for example, horseradish peroxidase, alkaline phosphatase, or luciferase, and the enzymatic label detected by determination of conversion of an appropriate substrate to product. In one embodiment, the assay comprises contacting a cell which expresses a membrane-bound form of NOVX protein, or a biologically-active portion thereof, on the cell surface with a known compound which binds NOVX to form an assay mixture, contacting the assay mixture with a test compound, and determining the ability of the test compound to interact with a NOVX protein, wherein determining the ability of the test compound to interact with a NOVX protein comprises determining the ability of the test compound to preferentially bind to NOVX protein or a biologically-active portion thereof as compared to the known compound.

[0258] In another embodiment, an assay is a cell-based assay comprising contacting a cell expressing a membrane-bound form of NOVX protein, or a biologically-active portion thereof, on the cell surface with a test compound and determining the ability of the test compound to modulate (e.g., stimulate or inhibit) the activity of the NOVX protein or biologically-active portion thereof. Determining the ability of the test compound to modulate the activity of NOVX or a biologically-active portion thereof can be accomplished, for example, by determining the ability of the NOVX protein to bind to or interact with a NOVX target molecule. As used herein, a “target molecule” is a molecule with which a NOVX protein binds or interacts in nature, for example, a molecule on the surface of a cell which expresses a NOVX interacting protein, a molecule on the surface of a second cell, a molecule in the extracellular milieu, a molecule associated with the internal surface of a cell membrane or a cytoplasmic molecule. A NOVX target molecule can be a non-NOVX molecule or a NOVX protein or polypeptide of the invention. In one embodiment, a NOVX target molecule is a component of a signal transduction pathway that facilitates transduction of an extracellular signal (e.g., a signal generated by binding of a compound to a membrane-bound NOVX molecule) through the cell membrane and into the cell. The target, for example, can be a second intercellular protein that has catalytic activity or a protein that facilitates the association of downstream signaling molecules with NOVX.

[0259] Determining the ability of the NOVX protein to bind to or interact with a NOVX target molecule can be accomplished by one of the methods described above for determining direct binding. In one embodiment, determining the ability of the NOVX protein to bind to or interact with a NOVX target molecule can be accomplished by determining the activity of the target molecule. For example, the activity of the target molecule can be determined by detecting induction of a cellular second messenger of the target (i.e., intracellular Ca²⁺, diacylglycerol, IP₃, etc.), detecting catalytic/enzymatic activity of the target an appropriate substrate, detecting the induction of a reporter gene (comprising a NOVX-responsive regulatory element operatively linked to a nucleic acid encoding a detectable marker, e.g. luciferase), or detecting a cellular response, for example, cell survival, cellular differentiation, or cell proliferation.

[0260] In yet another embodiment, an assay of the invention is a cell-free assay comprising contacting a NOVX protein or biologically-active portion thereof with a test compound and determining the ability of the test compound to bind to the NOVX protein or biologically-active portion thereof. Binding of the test compound to the NOVX protein can be determined either directly or indirectly as described above. In one such embodiment, the assay comprises contacting the NOVX protein or biologically-active portion thereof with a known compound which binds NOVX to form an assay mixture, contacting the assay mixture with a test compound, and determining the ability of the test compound to interact with a NOVX protein, wherein determining the ability of the test compound to interact with a NOVX protein comprises determining the ability of the test compound to preferentially bind to NOVX or biologically-active portion thereof as compared to the known compound.

[0261] In still another embodiment, an assay is a cell-free assay comprising contacting NOVX protein or biologically-active portion thereof with a test compound and determining the ability of the test compound to modulate (e.g., stimulate or inhibit) the activity of the NOVX protein or biologically-active portion thereof. Determining the ability of the test compound to modulate the activity of NOVX can be accomplished, for example, by determining the ability of the NOVX protein to bind to a NOVX target molecule by one of the methods described above for determining direct binding. In an alternative embodiment, determining the ability of the test compound to modulate the activity of NOVX protein can be accomplished by determining the ability of the NOVX protein further modulate a NOVX target molecule. For example, the catalytic/enzymatic activity of the target molecule on an appropriate substrate can be determined as described, supra.

[0262] In yet another embodiment, the cell-free assay comprises contacting the NOVX protein or biologically-active portion thereof with a known compound which binds NOVX protein to form an assay mixture, contacting the assay mixture with a test compound, and determining the ability of the test compound to interact with a NOVX protein, wherein determining the ability of the test compound to interact with a NOVX protein comprises determining the ability of the NOVX protein to preferentially bind to or modulate the activity of a NOVX target molecule.

[0263] The cell-free assays of the invention are amenable to use of both the soluble form or the membrane-bound form of NOVX protein. In the case of cell-free assays comprising the membrane-bound form of NOVX protein, it may be desirable to utilize a solubilizing agent such that the membrane-bound form of NOVX protein is maintained in solution. Examples of such solubilizing agents include non-ionic detergents such as n-octylglucoside, n-dodecylglucoside, n-dodecylmaltoside, octanoyl-N-methylglucamide, decanoyl-N-methylglucamide, Triton® X-100, Triton® X-114, Thesit®, Isotridecypoly(ethylene glycol ether)ₙ, N-dodecyl-N,N-dimethyl-3-ammonio-1-propane sulfonate, 3-(3-cholamidopropyl)dimethylamminiol-1-propane sulfonate (CHAPS), or 3-(3-cholamidopropyl)dimethylamminiol-2-hydroxy-1-propane sulfonate (CHAPSO).

[0264] In more than one embodiment of the above assay methods of the invention, it may be desirable to immobilize either NOVX protein or its target molecule to facilitate separation of complexed from uncomplexed forms of one or both of the proteins, as well as to accommodate automation of the assay. Binding of a test compound to NOVX protein, or interaction of NOVX protein with a target molecule in the presence and absence of a candidate compound, can be accomplished in any vessel suitable for containing the reactants. Examples of such vessels include microtiter plates, test tubes, and micro-centrifuge tubes. In one embodiment, a fusion protein can be provided that adds a domain that allows one or both of the proteins to be bound to a matrix. For example, GST-NOVX fusion proteins or GST-target fusion proteins can be adsorbed onto glutathione sepharose beads (Sigma Chemical, St. Louis, Mo.) or glutathione derivatized microtiter plates, that are then combined with the test compound or the test compound and either the non-adsorbed target protein or NOVX protein, and the mixture is incubated under conditions conducive to complex formation (e.g., at physiological conditions for salt and pH). Following incubation, the beads or microtiter plate wells are washed to remove any unbound components, the matrix immobilized in the case of beads, complex determined either directly or indirectly, for example, as described, supra. Alternatively, the complexes can be dissociated from the matrix, and the level of NOVX protein binding or activity determined using standard techniques.

[0265] Other techniques for immobilizing proteins on matrices can also be used in the screening assays of the invention. For example, either the NOVX protein or its target molecule can be immobilized utilizing conjugation of biotin and streptavidin. Biotinylated NOVX protein or target molecules can be prepared from biotin-NHS (N-hydroxy-succinimide) using techniques well-known within the art (e.g., biotinylation kit, Pierce Chemicals, Rockford, Ill.), and immobilized in the wells of streptavidin-coated 96 well plates (Pierce Chemical). Alternatively, antibodies reactive with NOVX protein or target molecules, but which do not interfere with binding of the NOVX protein to its target molecule, can be derivatized to the wells of the plate, and unbound target or NOVX protein trapped in the wells by antibody conjugation. Methods for detecting such complexes, in addition to those described above for the GST-immobilized complexes, include immunodetection of complexes using antibodies reactive with the NOVX protein or target molecule, as well as enzyme-linked assays that rely on detecting an enzymatic activity associated with the NOVX protein or target molecule.

[0266] In another embodiment, modulators of NOVX protein expression are identified in a method wherein a cell is contacted with a candidate compound and the expression of NOVX mRNA or protein in the cell is determined. The level of expression of NOVX mRNA or protein in the presence of the candidate compound is compared to the level of expression of NOVX mRNA or protein in the absence of the candidate compound. The candidate compound can then be identified as a modulator of NOVX mRNA or protein expression based upon this comparison. For example, when expression of NOVX mRNA or protein is greater (i.e., statistically significantly greater) in the presence of the candidate compound than in its absence, the candidate compound is identified as a stimulator of NOVX mRNA or protein expression. Alternatively, when expression of NOVX mRNA or protein is less (statistically significantly less) in the presence of the candidate compound than in its absence, the candidate compound is identified as an inhibitor of NOVX mRNA or protein expression. The level of NOVX mRNA or protein expression in the cells can be determined by methods described herein for detecting NOVX mRNA or protein.

[0267] In yet another aspect of the invention, the NOVX proteins can be used as “bait proteins” in a two-hybrid assay or three hybrid assay (see, e.g., U.S. Pat. No. 5,283,317; Zervos, et al., 1993. Cell 72: 223-232; Madura, et al., 1993. J. Biol. Chem. 268: 12046-12054; Bartel, et al., 1993. Biotechniques 14: 920-924; Iwabuchi, et al., 1993. Oncogene 8: 1693-1696; and Brent WO 94/10300), to identify other proteins that bind to or interact with NOVX (“NOVX-binding proteins” or “NOVX-bp”) and modulate NOVX activity. Such NOVX-binding proteins are also involved in the propagation of signals by the NOVX proteins as, for example, upstream or downstream elements of the NOVX pathway.

[0268] The two-hybrid system is based on the modular nature of most transcription factors, which consist of separable DNA-binding and activation domains. Briefly, the assay utilizes two different DNA constructs. In one construct, the gene that codes for NOVX is fused to a gene encoding the DNA binding domain of a known transcription factor (e.g., GAL-4). In the other construct, a DNA sequence, from a library of DNA sequences, that encodes an unidentified protein (“prey” or “sample”) is fused to a gene that codes for the activation domain of the known transcription factor. If the “bait” and the “prey” proteins are able to interact, in vivo, forming a NOVX-dependent complex, the DNA-binding and activation domains of the transcription factor are brought into close proximity. This proximity allows transcription of a reporter gene (e.g., LacZ) that is operably linked to a transcriptional regulatory site responsive to the transcription factor. Expression of the reporter gene can be detected and cell colonies containing the functional transcription factor can be isolated and used to obtain the cloned gene that encodes the protein which interacts with NOVX.

[0269] In yet another aspect of the invention a method for identifying compounds that modulate target polypeptide (NOVX) activity is disclosed wherein the method comprises: (a) combining a test compound with a target polypeptide and a substrate of the target polypeptide; and (b) determining whether the test compound modulates the activity of the target polypeptide; wherein the target polypeptide comprises an amino acid sequence selected from the group consisting of SEQ ID NO:2n, wherein n is an integer between 1 and 85, the amino acid sequence that is at least 95% identical to SEQ ID NO:2n, the amino acid sequence of at least one domain of SEQ ID NO:2n, and the amino acid sequence that is at least 95% identical to the at least one domain of SEQ ID NO:2n.

[0270] The method further comprising a step of identifying the test compound that modulates the target polypeptide activity by modulating the target polypeptide activity as modulator of the target polypetide. Such modulator could be an inhibitor, an activator, an antagonist, or an agonist of NOVX target polypeptide.

[0271] The method also further comprising a step of identifying the test compound that modulates the target polypeptide activity as an enhancer of insulin secretion, or as a therapeutic for treatment of insulin resistance, obesity and/or diabetes.

[0272] In the above described method, the target polypeptide (NOVX) could be an isolated polypetide.

[0273] The target polypeptide could be produced by a process comprising culturing a recombinant host cell, the recombinant host cell comprising a nucleic acid encoding the target polypeptide, under conditions promoting expression of the target polypeptide. In such a method, the nucleic acid comprises a nucleotide sequence selected from the group consisting of: (a) SEQ ID NO:2n-1, wherein n is an integer between 1 and 85; (b) nucleotides encoding an amino acid sequence of the at least one domain of SEQ ID NO:2n; and (c) a nucleotide sequence encoding an amino acid sequence selected from the group consisting of SEQ ID NO:2n, the amino acid sequence that is at least 95% identical to SEQ ID NO:2n, the amino acid sequence of at least one domain of SEQ ID NO:2n, and the amino acid sequence that is at least 95% identical to the at least one domain of SEQ ID NO:2n.

[0274] Alternatively, the target polypeptide could be produced by expression of a recombinant vector comprising a nucleic acid, the nucleic acid encoding an amino acid sequence selected from the group consisting of SEQ ID NO:2n, wherein n is an integer between 1 and 85, the amino acid sequence that is at least 95% identical to SEQ ID NO:2n, the amino acid sequence of at least one domain of SEQ ID NO:2n, and the amino acid sequence that is at least 95% identical to the at least one domain of SEQ ID NO:2n. Here, the test compound could be combined with the target polypeptide in a mammalian cell grown in culture. Also, the test compound could be combined with the target polypeptide in vitro. In this method, the nucleic acid comprises a nucleotide sequence selected from the group consisting of: (a) SEQ ID NO:2n-1, wherein n is an integer between 1 and 85; (b) nucleotides encoding an amino acid sequence of the at least one domain of SEQ ID NO:2n; and (c) a nucleotide sequence encoding an amino acid sequence selected from the group consisting of SEQ ID NO:2n, the amino acid sequence that is at least 95% identical to SEQ ID NO:2n, the amino acid sequence of at least one domain of SEQ ID NO:2n, and the amino acid sequence that is at least 95% identical to the at least one domain of SEQ ID NO:2n.

[0275] In yet another embodiment, the target polypeptide is produced by expression of an endogenous nucleic acid, the endogenous nucleic acid encoding an amino acid sequence selected from the group consisting of SEQ ID NO:2n, wherein n is an integer between 1 and 85, the amino acid sequence that is at least 95% identical to SEQ ID NO:2n, the amino acid sequence of at least one domain of SEQ ID NO:2n, and the amino acid sequence that is at least 95% identical to the at least one domain of SEQ ID NO:2n. Here as well, the test compound could be combined with the target polypeptide in a mammalian cell grown in culture. Also, the test compound could be combined with the target polypeptide in vitro. In this method, the nucleic acid comprises a nucleotide sequence selected from the group consisting of: (a) SEQ ID NO:2n-1, wherein n is an integer between 1 and 85; (b) nucleotides encoding an amino acid sequence of the at least one domain of SEQ ID NO:2n; and (c) a nucleotide sequence encoding an amino acid sequence selected from the group consisting of SEQ ID NO:2n, the amino acid sequence that is at least 95% identical to SEQ ID NO:2n, the amino acid sequence of at least one domain of SEQ ID NO:2n, and the amino acid sequence that is at least 95% identical to the at least one domain of SEQ ID NO:2n.

[0276] The invention further pertains to novel agents identified by the aforementioned screening assays and uses thereof for treatments as described herein.

[0277] Detection Assays

[0278] Portions or fragments of the cDNA sequences identified herein (and the corresponding complete gene sequences) can be used in numerous ways as polynucleotide reagents. By way of example, and not of limitation, these sequences can be used to: (i) map their respective genes on a chromosome; and, thus, locate gene regions associated with genetic disease; (ii) identify an individual from a minute biological sample (tissue typing); and (iii) aid in forensic identification of a biological sample. Some of these applications are described in the subsections, below.

[0279] Chromosome Mapping

[0280] Once the sequence (or a portion of the sequence) of a gene has been isolated, this sequence can be used to map the location of the gene on a chromosome. This process is called chromosome mapping. Accordingly, portions or fragments of the NOVX sequences of SEQ ID NO:2n-1, wherein n is an integer between 1 and 85, or fragments or derivatives thereof, can be used to map the location of the NOVX genes, respectively, on a chromosome. The mapping of the NOVX sequences to chromosomes is an important first step in correlating these sequences with genes associated with disease.

[0281] Briefly, NOVX genes can be mapped to chromosomes by preparing PCR primers (preferably 15-25 bp in length) from the NOVX sequences. Computer analysis of the NOVX, sequences can be used to rapidly select primers that do not span more than one exon in the genomic DNA, thus complicating the amplification process. These primers can then be used for PCR screening of somatic cell hybrids containing individual human chromosomes. Only those hybrids containing the human gene corresponding to the NOVX sequences will yield an amplified fragment.

[0282] Somatic cell hybrids are prepared by fusing somatic cells from different mammals (e.g., human and mouse cells). As hybrids of human and mouse cells grow and divide, they gradually lose human chromosomes in random order, but retain the mouse chromosomes. By using media in which mouse cells cannot grow, because they lack a particular enzyme, but in which human cells can, the one human chromosome that contains the gene encoding the needed enzyme will be retained. By using various media, panels of hybrid cell lines can be established. Each cell line in a panel contains either a single human chromosome or a small number of human chromosomes, and a full set of mouse chromosomes, allowing easy mapping of individual genes to specific human chromosomes. See, e.g., D'Eustachio, et al., 1983. Science 220: 919-924. Somatic cell hybrids containing only fragments of human chromosomes can also be produced by using human chromosomes with translocations and deletions.

[0283] PCR mapping of somatic cell hybrids is a rapid procedure for assigning a particular sequence to a particular chromosome. Three or more sequences can be assigned per day using a single thermal cycler. Using the NOVX sequences to design oligonucleotide primers, sub-localization can be achieved with panels of fragments from specific chromosomes.

[0284] Fluorescence in situ hybridization (FISH) of a DNA sequence to a metaphase chromosomal spread can further be used to provide a precise chromosomal location in one step. Chromosome spreads can be made using cells whose division has been blocked in metaphase by a chemical like colcemid that disrupts the mitotic spindle. The chromosomes can be treated briefly with trypsin, and then stained with Giemsa. A pattern of light and dark bands develops on each chromosome, so that the chromosomes can be identified individually. The FISH technique can be used with a DNA sequence as short as 500 or 600 bases. However, clones larger than 1,000 bases have a higher likelihood of binding to a unique chromosomal location with sufficient signal intensity for simple detection. Preferably 1,000 bases, and more preferably 2,000 bases, will suffice to get good results at a reasonable amount of time. For a review of this technique, see, Verma, et al., HUMAN CHROMOSOMES: A MANUAL OF BASIC TECHNIQUES (Pergamon Press, New York 1988).

[0285] Reagents for chromosome mapping can be used individually to mark a single chromosome or a single site on that chromosome, or panels of reagents can be used for marking multiple sites and/or multiple chromosomes. Reagents corresponding to noncoding regions of the genes actually are preferred for mapping purposes. Coding sequences are more likely to be conserved within gene families, thus increasing the chance of cross hybridizations during chromosomal mapping.

[0286] Once a sequence has been mapped to a precise chromosomal location, the physical position of the sequence on the chromosome can be correlated with genetic map data. Such data are found, e.g., in McKusick, MENDELIAN INHERITANCE IN MAN, available on-line through Johns Hopkins University Welch Medical Library). The relationship between genes and disease, mapped to the same chromosomal region, can then be identified through linkage analysis (co-inheritance of physically adjacent genes), described in, e.g., Egeland, et al., 1987. Nature, 325: 783-787.

[0287] Moreover, differences in the DNA sequences between individuals affected and unaffected with a disease associated with the NOVX gene, can be determined. If a mutation is observed in some or all of the affected individuals but not in any unaffected individuals, then the mutation is likely to be the causative agent of the particular disease. Comparison of affected and unaffected individuals generally involves first looking for structural alterations in the chromosomes, such as deletions or translocations that are visible from chromosome spreads or detectable using PCR based on that DNA sequence. Ultimately, complete sequencing of genes from several individuals can be performed to confirm the presence of a mutation and to distinguish mutations from polymorphisms.

Tissue Typing

[0288] The NOVX sequences of the invention can also be used to identify individuals from minute biological samples. In this technique, an individual's genomic DNA is digested with one or more restriction enzymes, and probed on a Southern blot to yield unique bands for identification. The sequences of the invention are useful as additional DNA markers for RFLP (“restriction fragment length polymorphisms,” described in U.S. Pat. No. 5,272,057).

[0289] Furthermore, the sequences of the invention can be used to provide an alternative technique that determines the actual base-by-base DNA sequence of selected portions of an individual's genome. Thus, the NOVX sequences described herein can be used to prepare two PCR primers from the 5′- and 3′-termini of the sequences. These primers can then be used to amplify an individual's DNA and subsequently sequence it.

[0290] Panels of corresponding DNA sequences from individuals, prepared in this manner, can provide unique individual identifications, as each individual will have a unique set of such DNA sequences due to allelic differences. The sequences of the invention can be used to obtain such identification sequences from individuals and from tissue. The NOVX sequences of the invention uniquely represent portions of the human genome. Allelic variation occurs to some degree in the coding regions of these sequences, and to a greater degree in the noncoding regions. It is estimated that allelic variation between individual humans occurs with a frequency of about once per each 500 bases. Much of the allelic variation is due to single nucleotide polymorphisms (SNPs), which include restriction fragment length polymorphisms (RFLPs).

[0291] Each of the sequences described herein can, to some degree, be used as a standard against which DNA from an individual can be compared for identification purposes. Because greater numbers of polymorphisms occur in the noncoding regions, fewer sequences are necessary to differentiate individuals. The noncoding sequences can comfortably provide positive individual identification with a panel of perhaps 10 to 1,000 primers that each yield a noncoding amplified sequence of 100 bases. If coding sequences, such as those of SEQ ID NO:2n-1, wherein n is an integer between 1 and 85, are used, a more appropriate number of primers for positive individual identification would be 500-2,000.

[0292] Predictive Medicine

[0293] The invention also pertains to the field of predictive medicine in which diagnostic assays, prognostic assays, pharmacogenomics, and monitoring clinical trials are used for prognostic (predictive) purposes to thereby treat an individual prophylactically. Accordingly, one aspect of the invention relates to diagnostic assays for determining NOVX protein and/or nucleic acid expression as well as NOVX activity, in the context of a biological sample (e.g., blood, serum, cells, tissue) to thereby determine whether an individual is afflicted with a disease or disorder, or is at risk of developing a disorder, associated with aberrant NOVX expression or activity. The disorders include metabolic disorders, diabetes, obesity, infectious disease, anorexia, cancer-associated cachexia, cancer, neurodegenerative disorders, Alzheimer's Disease, Parkinson's Disorder, immune disorders, and hematopoietic disorders, and the various dyslipidemias, metabolic disturbances associated with obesity, the metabolic syndrome X and wasting disorders associated with chronic diseases and various cancers. The invention also provides for prognostic (or predictive) assays for determining whether an individual is at risk of developing a disorder associated with NOVX protein, nucleic acid expression or activity. For example, mutations in a NOVX gene can be assayed in a biological sample. Such assays can be used for prognostic or predictive purpose to thereby prophylactically treat an individual prior to the onset of a disorder characterized by or associated with NOVX protein, nucleic acid expression, or biological activity.

[0294] Another aspect of the invention provides methods for determining NOVX protein, nucleic acid expression or activity in an individual to thereby select appropriate therapeutic or prophylactic agents for that individual (referred to herein as “pharmacogenomics”). Pharmacogenomics allows for the selection of agents (e.g., drugs) for therapeutic or prophylactic treatment of an individual based on the genotype of the individual (e.g., the genotype of the individual examined to determine the ability of the individual to respond to a particular agent.)

[0295] Yet another aspect of the invention pertains to monitoring the influence of agents (e.g., drugs, compounds) on the expression or activity of NOVX in clinical trials.

[0296] These and other agents are described in further detail in the following sections.

[0297] Diagnostic Assays

[0298] An exemplary method for detecting the presence or absence of NOVX in a biological sample involves obtaining a biological sample from a test subject and contacting the biological sample with a compound or an agent capable of detecting NOVX protein or nucleic acid (e.g., mRNA, genomic DNA) that encodes NOVX protein such that the presence of NOVX is detected in the biological sample. An agent for detecting NOVX mRNA or genomic DNA is a labeled nucleic acid probe capable of hybridizing to NOVX mRNA or genomic DNA. The nucleic acid probe can be, for example, a full-length NOVX nucleic acid, such as the nucleic acid of SEQ ID NO:2n-1, wherein n is an integer between 1 and 85, or a portion thereof, such as an oligonucleotide of at least 15, 30, 50, 100, 250 or 500 nucleotides in length and sufficient to specifically hybridize under stringent conditions to NOVX mRNA or genomic DNA. Other suitable probes for use in the diagnostic assays of the invention are described herein.

[0299] An agent for detecting NOVX protein is an antibody capable of binding to NOVX protein, preferably an antibody with a detectable label. Antibodies can be polyclonal, or more preferably, monoclonal. An intact antibody, or a fragment thereof (e.g., F_{ab} or F(ab′)₂) can be used. The term “labeled”, with regard to the probe or antibody, is intended to encompass direct labeling of the probe or antibody by coupling (i.e., physically linking) a detectable substance to the probe or antibody, as well as indirect labeling of the probe or antibody by reactivity with another reagent that is directly labeled. Examples of indirect labeling include detection of a primary antibody using a fluorescently-labeled secondary antibody and end-labeling of a DNA probe with biotin such that it can be detected with fluorescently-labeled streptavidin. The term “biological sample” is intended to include tissues, cells and biological fluids isolated from a subject, as well as tissues, cells and fluids present within a subject. That is, the detection method of the invention can be used to detect NOVX mRNA, protein, or genomic DNA in a biological sample in vitro as well as in vivo. For example, in vitro techniques for detection of NOVX mRNA include Northern hybridizations and in situ hybridizations. In vitro techniques for detection of NOVX protein include enzyme linked immunosorbent assays (ELISAs), Western blots, immunoprecipitations, and immunofluorescence. In vitro techniques for detection of NOVX genomic DNA include Southern hybridizations. Furthermore, in vivo techniques for detection of NOVX protein include introducing into a subject a labeled anti-NOVX antibody. For example, the antibody can be labeled with a radioactive marker whose presence and location in a subject can be detected by standard imaging techniques.

[0300] In one embodiment, the biological sample contains protein molecules from the test subject. Alternatively, the biological sample can contain mRNA molecules from the test subject or genomic DNA molecules from the test subject. A preferred biological sample is a peripheral blood leukocyte sample isolated by conventional means from a subject.

[0301] In another embodiment, the methods further involve obtaining a control biological sample from a control subject, contacting the control sample with a compound or agent capable of detecting NOVX protein, mRNA, or genomic DNA, such that the presence of NOVX protein, mRNA or genomic DNA is detected in the biological sample, and comparing the presence of NOVX protein, mRNA or genomic DNA in the control sample with the presence of NOVX protein, mRNA or genomic DNA in the test sample.

[0302] The invention also encompasses kits for detecting the presence of NOVX in a biological sample. For example, the kit can comprise: a labeled compound or agent capable of detecting NOVX protein or mRNA in a biological sample; means for determining the amount of NOVX in the sample; and means for comparing the amount of NOVX in the sample with a standard. The compound or agent can be packaged in a suitable container. The kit can further comprise instructions for using the kit to detect NOVX protein or nucleic acid.

[0303] Prognostic Assays

[0304] The diagnostic methods described herein can furthermore be utilized to identify subjects having or at risk of developing a disease or disorder associated with aberrant NOVX expression or activity. For example, the assays described herein, such as the preceding diagnostic assays or the following assays, can be utilized to identify a subject having or at risk of developing a disorder associated with NOVX protein, nucleic acid expression or activity. Alternatively, the prognostic assays can be utilized to identify a subject having or at risk for developing a disease or disorder. Thus, the invention provides a method for identifying a disease or disorder associated with aberrant NOVX expression or activity in which a test sample is obtained from a subject and NOVX protein or nucleic acid (e.g., mRNA, genomic DNA) is detected, wherein the presence of NOVX protein or nucleic acid is diagnostic for a subject having or at risk of developing a disease or disorder associated with aberrant NOVX expression or activity. As used herein, a “test sample” refers to a biological sample obtained from a subject of interest. For example, a test sample can be a biological fluid (e.g., serum), cell sample, or tissue.

[0305] Furthermore, the prognostic assays described herein can be used to determine whether a subject can be administered an agent (e.g., an agonist, antagonist, peptidomimetic, protein, peptide, nucleic acid, small molecule, or other drug candidate) to treat a disease or disorder associated with aberrant NOVX expression or activity. For example, such methods can be used to determine whether a subject can be effectively treated with an agent for a disorder. Thus, the invention provides methods for determining whether a subject can be effectively treated with an agent for a disorder associated with aberrant NOVX expression or activity in which a test sample is obtained and NOVX protein or nucleic acid is detected (e.g., wherein the presence of NOVX protein or nucleic acid is diagnostic for a subject that can be administered the agent to treat a disorder associated with aberrant NOVX expression or activity).

[0306] The methods of the invention can also be used to detect genetic lesions in a NOVX gene, thereby determining if a subject with the lesioned gene is at risk for a disorder characterized by aberrant cell proliferation and/or differentiation. In various embodiments, the methods include detecting, in a sample of cells from the subject, the presence or absence of a genetic lesion characterized by at least one of an alteration affecting the integrity of a gene encoding a NOVX-protein, or the misexpression of the NOVX gene. For example, such genetic lesions can be detected by ascertaining the existence of at least one of: (i) a deletion of one or more nucleotides from a NOVX gene; (ii) an addition of one or more nucleotides to a NOVX gene; (iii) a substitution of one or more nucleotides of a NOVX gene, (iv) a chromosomal rearrangement of a NOVX gene; (v) an alteration in the level of a messenger RNA transcript of a NOVX gene, (vi) aberrant modification of a NOVX gene, such as of the methylation pattern of the genomic DNA, (vii) the presence of a non-wild-type splicing pattern of a messenger RNA transcript of a NOVX gene, (viii) a non-wild-type level of a NOVX protein, (ix) allelic loss of a NOVX gene, and (x) inappropriate post-translational modification of a NOVX protein. As described herein, there are a large number of assay techniques known in the art which can be used for detecting lesions in a NOVX gene. A preferred biological sample is a peripheral blood leukocyte sample isolated by conventional means from a subject. However, any biological sample containing nucleated cells may be used, including, for example, buccal mucosal cells.

[0307] In certain embodiments, detection of the lesion involves the use of a probe/primer in a polymerase chain reaction (PCR) (see, e.g., U.S. Pat. Nos. 4,683,195 and 4,683,202), such as anchor PCR or RACE PCR, or, alternatively, in a ligation chain reaction (LCR) (see, e.g., Landegran, et al., 1988. Science 241: 1077-1080; and Nakazawa, et al., 1994. Proc. Natl. Acad. Sci. USA 91: 360-364), the latter of which can be particularly useful for detecting point mutations in the NOVX-gene (see, Abravaya, et al., 1995. Nucl. Acids Res. 23: 675-682). This method can include the steps of collecting a sample of cells from a patient, isolating nucleic acid (e.g., genomic, mRNA or both) from the cells of the sample, contacting the nucleic acid sample with one or more primers that specifically hybridize to a NOVX gene under conditions such that hybridization and amplification of the NOVX gene (if present) occurs, and detecting the presence or absence of an amplification product, or detecting the size of the amplification product and comparing the length to a control sample. It is anticipated that PCR and/or LCR may be desirable to use as a preliminary amplification step in conjunction with any of the techniques used for detecting mutations described herein.

[0308] Alternative amplification methods include: self sustained sequence replication (see, Guatelli, et al., 1990. Proc. Natl. Acad. Sci. USA 87: 1874-1878), transcriptional amplification system (see, Kwoh, et al., 1989. Proc. Natl. Acad. Sci. USA 86: 1173-1177); Qβ Replicase (see, Lizardi, et al, 1988. BioTechnology 6: 1197), or any other nucleic acid amplification method, followed by the detection of the amplified molecules using techniques well known to those of skill in the art. These detection schemes are especially useful for the detection of nucleic acid molecules if such molecules are present in very low numbers.

[0309] In an alternative embodiment, mutations in a NOVX gene from a sample cell can be identified by alterations in restriction enzyme cleavage patterns. For example, sample and control DNA is isolated, amplified (optionally), digested with one or more restriction endonucleases, and fragment length sizes are determined by gel electrophoresis and compared. Differences in fragment length sizes between sample and control DNA indicates mutations in the sample DNA. Moreover, the use of sequence specific ribozymes (see, e.g., U.S. Pat. No. 5,493,531) can be used to score for the presence of specific mutations by development or loss of a ribozyme cleavage site.

[0310] In other embodiments, genetic mutations in NOVX can be identified by hybridizing a sample and control nucleic acids, e.g., DNA or RNA, to high-density arrays containing hundreds or thousands of oligonucleotides probes. See, e.g., Cronin, et al., 1996. Human Mutation 7: 244-255; Kozal, et al., 1996. Nat. Med. 2: 753-759. For example, genetic mutations in NOVX can be identified in two dimensional arrays containing light-generated DNA probes as described in Cronin, et al., supra. Briefly, a first hybridization array of probes can be used to scan through long stretches of DNA in a sample and control to identify base changes between the sequences by making linear arrays of sequential overlapping probes. This step allows the identification of point mutations. This is followed by a second hybridization array that allows the characterization of specific mutations by using smaller, specialized probe arrays complementary to all variants or mutations detected. Each mutation array is composed of parallel probe sets, one complementary to the wild-type gene and the other complementary to the mutant gene.

[0311] In yet another embodiment, any of a variety of sequencing reactions known in the art can be used to directly sequence the NOVX gene and detect mutations by comparing the sequence of the sample NOVX with the corresponding wild-type (control) sequence. Examples of sequencing reactions include those based on techniques developed by Maxim and Gilbert, 1977. Proc. Natl. Acad. Sci. USA 74: 560 or Sanger, 1977. Proc. Natl. Acad. Sci. USA 74: 5463. It is also contemplated that any of a variety of automated sequencing procedures can be utilized when performing the diagnostic assays (see, e.g., Naeve, et al., 1995. Biotechniques 19: 448), including sequencing by mass spectrometry (see, e.g., PCT International Publication No. WO 94/16101; Cohen, et al., 1996. Adv. Chromatography 36: 127-162; and Griffin, et al., 1993. Appl. Biochem. Biotechnol. 38: 147-159).

[0312] Other methods for detecting mutations in the NOVX gene include methods in which protection from cleavage agents is used to detect mismatched bases in RNA/RNA or RNA/DNA heteroduplexes. See, e.g., Myers, et al., 1985. Science 230: 1242. In general, the art technique of “mismatch cleavage” starts by providing heteroduplexes of formed by hybridizing (labeled) RNA or DNA containing the wild-type NOVX sequence with potentially mutant RNA or DNA obtained from a tissue sample. The double-stranded duplexes are treated with an agent that cleaves single-stranded regions of the duplex such as which will exist due to basepair mismatches between the control and sample strands. For instance, RNA/DNA duplexes can be treated with RNase and DNA/DNA hybrids treated with S1 nuclease to enzymatically digesting the mismatched regions. In other embodiments, either DNA/DNA or RNA/DNA duplexes can be treated with hydroxylamine or osmium tetroxide and with piperidine in order to digest mismatched regions. After digestion of the mismatched regions, the resulting material is then separated by size on denaturing polyacrylamide gels to determine the site of mutation. See, e.g., Cotton, et al., 1988. Proc. Natl. Acad. Sci. USA 85: 4397; Saleeba, et al., 1992. Methods Enzymol. 217: 286-295. In an embodiment, the control DNA or RNA can be labeled for detection.

[0313] In still another embodiment, the mismatch cleavage reaction employs one or more proteins that recognize mismatched base pairs in double-stranded DNA (so called “DNA mismatch repair” enzymes) in defined systems for detecting and mapping point mutations in NOVX cDNAs obtained from samples of cells. For example, the mutY enzyme of E. coli cleaves A at G/A mismatches and the thymidine DNA glycosylase from HeLa cells cleaves T at G/T mismatches. See, e.g., Hsu, et al., 1994. Carcinogenesis 15: 1657-1662. According to an exemplary embodiment, a probe based on a NOVX sequence, e.g., a wild-type NOVX sequence, is hybridized to a cDNA or other DNA product from a test cell(s). The duplex is treated with a DNA mismatch repair enzyme, and the cleavage products, if any, can be detected from electrophoresis protocols or the like. See, e.g., U.S. Pat. No. 5,459,039.

[0314] In other embodiments, alterations in electrophoretic mobility will be used to identify mutations in NOVX genes. For example, single strand conformation polymorphism (SSCP) may be used to detect differences in electrophoretic mobility between mutant and wild type nucleic acids. See, e.g., Orita, et al., 1989. Proc. Natl. Acad. Sci. USA: 86: 2766; Cotton, 1993. Mutat. Res. 285: 125-144; Hayashi, 1992. Genet. Anal. Tech. Appl. 9: 73-79. Single-stranded DNA fragments of sample and control NOVX nucleic acids will be denatured and allowed to renature. The secondary structure of single-stranded nucleic acids varies according to sequence, the resulting alteration in electrophoretic mobility enables the detection of even a single base change. The DNA fragments may be labeled or detected with labeled probes. The sensitivity of the assay may be enhanced by using RNA (rather than DNA), in which the secondary structure is more sensitive to a change in sequence. In one embodiment, the subject method utilizes heteroduplex analysis to separate double stranded heteroduplex molecules on the basis of changes in electrophoretic mobility. See, e.g., Keen, et al., 1991. Trends Genet. 7: 5.

[0315] In yet another embodiment, the movement of mutant or wild-type fragments in polyacrylamide gels containing a gradient of denaturant is assayed using denaturing gradient gel electrophoresis (DGGE). See, e.g., Myers, et al., 1985. Nature 313: 495. When DGGE is used as the method of analysis, DNA will be modified to insure that it does not completely denature, for example by adding a GC clamp of approximately 40 bp of high-melting GC-rich DNA by PCR. In a further embodiment, a temperature gradient is used in place of a denaturing gradient to identify differences in the mobility of control and sample DNA. See, e.g., Rosenbaum and Reissner, 1987. Biophys. Chem. 265: 12753.

[0316] Examples of other techniques for detecting point mutations include, but are not limited to, selective oligonucleotide hybridization, selective amplification, or selective primer extension. For example, oligonucleotide primers may be prepared in which the known mutation is placed centrally and then hybridized to target DNA under conditions that permit hybridization only if a perfect match is found. See, e.g., Saiki, et al., 1986. Nature 324: 163; Saiki, et al., 1989. Proc. Natl. Acad. Sci. USA 86: 6230. Such allele specific oligonucleotides are hybridized to PCR amplified target DNA or a number of different mutations when the oligonucleotides are attached to the hybridizing membrane and hybridized with labeled target DNA.

[0317] Alternatively, allele specific amplification technology that depends on selective PCR amplification may be used in conjunction with the instant invention. Oligonucleotides used as primers for specific amplification may carry the mutation of interest in the center of the molecule (so that amplification depends on differential hybridization; see, e.g. Gibbs, et al., 1989. Nucl. Acids Res. 17: 2437-2448) or at the extreme 3′-terminus of one primer where, under appropriate conditions, mismatch can prevent, or reduce polymerase extension (see, e.g., Prossner, 1993. Tibtech. 11: 238). In addition it may be desirable to introduce a novel restriction site in the region of the mutation to create cleavage-based detection. See, e.g., Gasparini, et al., 1992. Mol. Cell Probes 6: 1. It is anticipated that in certain embodiments amplification may also be performed using Taq ligase for amplification. See, e.g., Barany, 1991. Proc. Natl. Acad. Sci. USA 88: 189. In such cases, ligation will occur only if there is a perfect match at the 3′-terminus of the 5′ sequence, making it possible to detect the presence of a known mutation at a specific site by looking for the presence or absence of amplification.

[0318] The methods described herein may be performed, for example, by utilizing pre-packaged diagnostic kits comprising at least one probe nucleic acid or antibody reagent described herein, which may be conveniently used, e.g., in clinical settings to diagnose patients exhibiting symptoms or family history of a disease or illness involving a NOVX gene.

[0319] Furthermore, any cell type or tissue, preferably peripheral blood leukocytes, in which NOVX is expressed may be utilized in the prognostic assays described herein. However, any biological sample containing nucleated cells may be used, including, for example, buccal mucosal cells.

[0320] Pharmacogenomics

[0321] Agents, or modulators that have a stimulatory or inhibitory effect on NOVX activity (e.g., NOVX gene expression), as identified by a screening assay described herein can be administered to individuals to treat (prophylactically or therapeutically) disorders. The disorders include but are not limited to, e.g., those diseases, disorders and conditions listed above, and more particularly include those diseases, disorders, or conditions associated with homologs of a NOVX protein, such as those summarized in Table 1.

[0322] In conjunction with such treatment, the pharmacogenomics (i.e., the study of the relationship between an individual's genotype and that individual's response to a foreign compound or drug) of the individual may be considered. Differences in metabolism of therapeutics can lead to severe toxicity or therapeutic failure by altering the relation between dose and blood concentration of the pharmacologically active drug. Thus, the pharmacogenomics of the individual permits the selection of effective agents (e.g., drugs) for prophylactic or therapeutic treatments based on a consideration of the individual's genotype. Such pharmacogenomics can further be used to determine appropriate dosages and therapeutic regimens. Accordingly, the activity of NOVX protein, expression of NOVX nucleic acid, or mutation content of NOVX genes in an individual can be determined to thereby select appropriate agent(s) for therapeutic or prophylactic treatment of the individual.

[0323] Pharmacogenomics deals with clinically significant hereditary variations in the response to drugs due to altered drug disposition and abnormal action in affected persons. See e.g., Eichelbaum, 1996. Clin. Exp. Pharmacol. Physiol., 23: 983-985; Linder, 1997. Clin. Chem., 43: 254-266. In general, two types of pharmacogenetic conditions can be differentiated. Genetic conditions transmitted as a single factor altering the way drugs act on the body (altered drug action) or genetic conditions transmitted as single factors altering the way the body acts on drugs (altered drug metabolism). These pharmacogenetic conditions can occur either as rare defects or as polymorphisms. For example, glucose-6-phosphate dehydrogenase (G6PD) deficiency is a common inherited enzymopathy in which the main clinical complication is hemolysis after ingestion of oxidant drugs (anti-malarials, sulfonamides, analgesics, nitrofurans) and consumption of fava beans.

[0324] As an illustrative embodiment, the activity of drug metabolizing enzymes is a major determinant of both the intensity and duration of drug action. The discovery of genetic polymorphisms of drug metabolizing enzymes (e.g., N-acetyltransferase 2 (NAT 2) and cytochrome pregnancy zone protein precursor enzymes CYP2D6 and CYP2C 19) has provided an explanation as to why some patients do not obtain the expected drug effects or show exaggerated drug response and serious toxicity after taking the standard and safe dose of a drug. These polymorphisms are expressed in two phenotypes in the population, the extensive metabolizer (EM) and poor metabolizer (PM). The prevalence of PM is different among different populations. For example, the gene coding for CYP2D6 is highly polymorphic and several mutations have been identified in PM, which all lead to the absence of functional CYP2D6. Poor metabolizers of CYP2D6 and CYP2C19 quite frequently experience exaggerated drug response and side effects when they receive standard doses. If a metabolite is the active therapeutic moiety, PM show no therapeutic response, as demonstrated for the analgesic effect of codeine mediated by its CYP2D6-formed metabolite morphine. At the other extreme are the so called ultra-rapid metabolizers who do not respond to standard doses. Recently, the molecular basis of ultra-rapid metabolism has been identified to be due to CYP2D6 gene amplification.

[0325] Thus, the activity of NOVX protein, expression of NOVX nucleic acid, or mutation content of NOVX genes in an individual can be determined to thereby select appropriate agent(s) for therapeutic or prophylactic treatment of the individual. In addition, pharmacogenetic studies can be used to apply genotyping of polymorphic alleles encoding drug-metabolizing enzymes to the identification of an individual's drug responsiveness phenotype. This knowledge, when applied to dosing or drug selection, can avoid adverse reactions or therapeutic failure and thus enhance therapeutic or prophylactic efficiency when treating a subject with a NOVX modulator, such as a modulator identified by one of the exemplary screening assays described herein.

[0326] Monitoring of Effects During Clinical Trials

[0327] Monitoring the influence of agents (e.g., drugs, compounds) on the expression or activity of NOVX (e.g., the ability to modulate aberrant cell proliferation and/or differentiation) can be applied not only in basic drug screening, but also in clinical trials. For example, the effectiveness of an agent determined by a screening assay as described herein to increase NOVX gene expression, protein levels, or upregulate NOVX activity, can be monitored in clinical trails of subjects exhibiting decreased NOVX gene expression, protein levels, or downregulated NOVX activity. Alternatively, the effectiveness of an agent determined by a screening assay to decrease NOVX gene expression, protein levels, or downregulate NOVX activity, can be monitored in clinical trails of subjects exhibiting increased NOVX gene expression, protein levels, or upregulated NOVX activity. In such clinical trials, the expression or activity of NOVX and, preferably, other genes that have been implicated in, for example, a cellular proliferation or immune disorder can be used as a “read out” or markers of the immune responsiveness of a particular cell.

[0328] By way of example, and not of limitation, genes, including NOVX, that are modulated in cells by treatment with an agent (e.g., compound, drug or small molecule) that modulates NOVX activity (e.g., identified in a screening assay as described herein) can be identified. Thus, to study the effect of agents on cellular proliferation disorders, for example, in a clinical trial, cells can be isolated and RNA prepared and analyzed for the levels of expression of NOVX and other genes implicated in the disorder. The levels of gene expression (i.e., a gene expression pattern) can be quantified by Northern blot analysis or RT-PCR, as described herein, or alternatively by measuring the amount of protein produced, by one of the methods as described herein, or by measuring the levels of activity of NOVX or other genes. In this manner, the gene expression pattern can serve as a marker, indicative of the physiological response of the cells to the agent. Accordingly, this response state may be determined before, and at various points during, treatment of the individual with the agent.

[0329] In one embodiment, the invention provides a method for monitoring the effectiveness of treatment of a subject with an agent (e.g., an agonist, antagonist, protein, peptide, peptidomimetic, nucleic acid, small molecule, or other drug candidate identified by the screening assays described herein) comprising the steps of (i) obtaining a pre-administration sample from a subject prior to administration of the agent; (ii) detecting the level of expression of a NOVX protein, mRNA, or genomic DNA in the preadministration sample; (iii) obtaining one or more post-administration samples from the subject; (iv) detecting the level of expression or activity of the NOVX protein, mRNA, or genomic DNA in the post-administration samples; (v) comparing the level of expression or activity of the NOVX protein, mRNA, or genomic DNA in the pre-administration sample with the NOVX protein, mRNA, or genomic DNA in the post administration sample or samples; and (vi) altering the administration of the agent to the subject accordingly. For example, increased administration of the agent may be desirable to increase the expression or activity of NOVX to higher levels than detected, i.e., to increase the effectiveness of the agent. Alternatively, decreased administration of the agent may be desirable to decrease expression or activity of NOVX to lower levels than detected, i.e., to decrease the effectiveness of the agent.

[0330] Methods of Treatment

[0331] The invention provides for both prophylactic and therapeutic methods of treating a subject at risk of (or susceptible to) a disorder or having a disorder associated with aberrant NOVX expression or activity. The disorders include but are not limited to, e.g., those diseases, disorders and conditions listed above, and more particularly include those diseases, disorders, or conditions associated with homologs of a NOVX protein, such as those summarized in Table 1.

[0332] These methods of treatment will be discussed more fully, below.

[0333] Diseases and Disorders

[0334] Diseases and disorders that are characterized by increased (relative to a subject not suffering from the disease or disorder) levels or biological activity may be treated with Therapeutics that antagonize (i.e., reduce or inhibit) activity. Therapeutics that antagonize activity may be administered in a therapeutic or prophylactic manner. Therapeutics that may be utilized include, but are not limited to: (i) an aforementioned peptide, or analogs, derivatives, fragments or homologs thereof; (ii) antibodies to an aforementioned peptide; (iii) nucleic acids encoding an aforementioned peptide; (iv) administration of antisense nucleic acid and nucleic acids that are “dysfunctional” (i.e., due to a heterologous insertion within the coding sequences of coding sequences to an aforementioned peptide) that are utilized to “knockout” endogenous function of an aforementioned peptide by homologous recombination (see, e.g., Capecchi, 1989. Science 244: 1288-1292); or (v) modulators (i.e., inhibitors, agonists and antagonists, including additional peptide mimetic of the invention or antibodies specific to a peptide of the invention) that alter the interaction between an aforementioned peptide and its binding partner.

[0335] Diseases and disorders that are characterized by decreased (relative to a subject not suffering from the disease or disorder) levels or biological activity may be treated with Therapeutics that increase (i.e., are agonists to) activity. Therapeutics that upregulate activity may be administered in a therapeutic or prophylactic manner. Therapeutics that may be utilized include, but are not limited to, an aforementioned peptide, or analogs, derivatives, fragments or homologs thereof; or an agonist that increases bioavailability.

[0336] Increased or decreased levels can be readily detected by quantifying peptide and/or RNA, by obtaining a patient tissue sample (e.g., from biopsy tissue) and assaying it in vitro for RNA or peptide levels, structure and/or activity of the expressed peptides (or mRNAs of an aforementioned peptide). Methods that are well-known within the art include, but are not limited to, immunoassays (e.g., by Western blot analysis, immunoprecipitation followed by sodium dodecyl sulfate (SDS) polyacrylamide gel electrophoresis, immunocytochemistry, etc.) and/or hybridization assays to detect expression of mRNAs (e.g., Northern assays, dot blots, in situ hybridization, and the like).

[0337] Prophylactic Methods

[0338] In one aspect, the invention provides a method for preventing, in a subject, a disease or condition associated with an aberrant NOVX expression or activity, by administering to the subject an agent that modulates NOVX expression or at least one NOVX activity. Subjects at risk for a disease that is caused or contributed to by aberrant NOVX expression or activity can be identified by, for example, any or a combination of diagnostic or prognostic assays as described herein. Administration of a prophylactic agent can occur prior to the manifestation of symptoms characteristic of the NOVX aberrancy, such that a disease or disorder is prevented or, alternatively, delayed in its progression. Depending upon the type of NOVX aberrancy, for example, a NOVX agonist or NOVX antagonist agent can be used for treating the subject. The appropriate agent can be determined based on screening assays described herein. The prophylactic methods of the invention are further discussed in the following subsections.

[0339] Therapeutic Methods

[0340] Another aspect of the invention pertains to methods of modulating NOVX expression or activity for therapeutic purposes. The modulatory method of the invention involves contacting a cell with an agent that modulates one or more of the activities of NOVX protein activity associated with the cell. An agent that modulates NOVX protein activity can be an agent as described herein, such as a nucleic acid or a protein, a naturally-occurring cognate ligand of a NOVX protein, a peptide, a NOVX peptidomimetic, or other small molecule. In one embodiment, the agent stimulates one or more NOVX protein activity. Examples of such stimulatory agents include active NOVX protein and a nucleic acid molecule encoding NOVX that has been introduced into the cell. In another embodiment, the agent inhibits one or more NOVX protein activity. Examples of such inhibitory agents include antisense NOVX nucleic acid molecules and anti-NOVX antibodies. These modulatory methods can be performed in vitro (e.g., by culturing the cell with the agent) or, alternatively, in vivo (e.g., by administering the agent to a subject). As such, the invention provides methods of treating an individual afflicted with a disease or disorder characterized by aberrant expression or activity of a NOVX protein or nucleic acid molecule. In one embodiment, the method involves administering an agent (e.g., an agent identified by a screening assay described herein), or combination of agents that modulates (e.g., up-regulates or down-regulates) NOVX expression or activity. In another embodiment, the method involves administering a NOVX protein or nucleic acid molecule as therapy to compensate for reduced or aberrant NOVX expression or activity.

[0341] Stimulation of NOVX activity is desirable in situations in which NOVX is abnormally downregulated and/or in which increased NOVX activity is likely to have a beneficial effect. One example of such a situation is where a subject has a disorder characterized by aberrant cell proliferation and/or differentiation (e.g., cancer or immune associated disorders). Another example of such a situation is where the subject has a gestational disease (e.g., preclampsia).

[0342] Determination of the Biological Effect of the Therapeutic

[0343] In various embodiments of the invention, suitable in vitro or in vivo assays are performed to determine the effect of a specific Therapeutic and whether its administration is indicated for treatment of the affected tissue.

[0344] In various specific embodiments, in vitro assays may be performed with representative cells of the type(s) involved in the patient's disorder, to determine if a given Therapeutic exerts the desired effect upon the cell type(s). Compounds for use in therapy may be tested in suitable animal model systems including, but not limited to rats, mice, chicken, cows, monkeys, rabbits, and the like, prior to testing in human subjects. Similarly, for in vivo testing, any of the animal model system known in the art may be used prior to administration to human subjects.

[0345] Prophylactic and Therapeutic Uses of the Compositions of the Invention

[0346] The NOVX nucleic acids and proteins of the invention are useful in potential prophylactic and therapeutic applications implicated in a variety of disorders. The disorders include but are not limited to, e.g., those diseases, disorders and conditions listed above, and more particularly include those diseases, disorders, or conditions associated with homologs of a NOVX protein, such as those summarized in Table 1.

[0347] As an example, a cDNA encoding the NOVX protein of the invention may be useful in gene therapy, and the protein may be useful when administered to a subject in need thereof. By way of non-limiting example, the compositions of the invention will have efficacy for treatment of patients suffering from diseases, disorders, conditions and the like, including but not limited to those listed herein.

[0348] Both the novel nucleic acid encoding the NOVX protein, and the NOVX protein of the invention, or fragments thereof, may also be useful in diagnostic applications, wherein the presence or amount of the nucleic acid or the protein are to be assessed. A further use could be as an anti-bacterial molecule (i.e., some peptides have been found to possess anti-bacterial properties). These materials are further useful in the generation of antibodies, which immunospecifically-bind to the novel substances of the invention for use in therapeutic or diagnostic methods.

[0349] The invention will be further described in the following examples, which do not limit the scope of the invention described in the claims.

[0350] NOVX Polypeptides

[0351] The following sections describe in detail the NOVX polypeptides of the invention and methods of screening for modulators of NOVX polypeptides.

A. NOV1—Cytosolic Phosphoenolpyruvate Carboxykinase (PEPCK)

[0352] The cytosolic isoform of PEPCK regulates glyceroneogenesis in adipose tissue. Glyceroneogenesis is an abbreviated version of gluconeogenesis in which glycerol-3-phosphate is produced from substrates such as pyruvate, lactate and alanine. The glycerol-3-phosphate thus produced is used in triglyceride synthesis. The role of glyceroneogenesis in maintaining the deposition of triglycerides in adipose tissue has been uncovered recently. Cytosolic PEPCK is also the rate-limiting enzyme for gluconeogenesis, the pathway in which glucose is produced in the liver from pyruvate, lactate and alanine. The process of hepatic gluconeogenesis is upregulated in Type 2 diabetes and is believed to contribute to the fasting hyperglycemia characteristic of this disease. The genetic and environmental causes of the complex metabolic disturbances of Type 2 diabetes, including increased hepatic glucose production, are incompletely understood.

[0353] CuraGen's GeneCalling® studies have shown that cytosolic PEPCK is upregulated in adipose tissue of obese AKR versus normal C57B1 mice. This result suggests that upregulation of PEPCK may contribute to the obese phenotype. This hypothesis is supported by the fact that transgenic overexpression of cytosolic PEPCK in adipose is associated with increased glyceroneogenesis, increased adipocyte (fat cell) size and fat mass, and higher body weight (Franckhauser S, Munoz S, Pujol A, Casellas A, Riu E, Otaegui P, Su B, Bosch F. Increased fatty acid re-esterification by PEPCK overexpression in adipose tissue leads to obesity without insulin resistance. Diabetes. 2002 March; 51 (3):624-30. PMID: 11872659). Furthermore, a mutation in the PPARgamma-binding site in the gene for cytosolic PEPCK reduces the activity of PEPCK, with a concomitamt increase in adiposity and body weight in mice (Olswang Y, Cohen H, Papo O, Cassuto H, Croniger C M, Hakimi P, Tilghman S M, Hanson R W, Reshef L. A mutation in the peroxisome proliferator-activated receptor gamma-binding site in the gene for the cytosolic form of phosphoenolpyruvate carboxykinase reduces adipose tissue size and fat content in mice. Proc Natl Acad Sci U S A. 2002 Jan. 22; 99 (2):625-30. PMID: 11792850). Thus, a reduction in the expression of cytosolic PEPCK reduced triglyceride deposition in adipose tissue, while an increase in adipose expression of PEPCK increased fat mass in mice.

[0354] Diet-induced obesity is a popular model for the study of pathways involved in the evolution of weight gain due to increased caloric intake. Mice are fed a high-fat diet (˜30-45% of calories from fat) for 12-16 weeks and then tissues are analyzed for changes in metabolic pathways as compared to control animals fed a normal rodent diet. CuraGen's GeneCalling® studies of adipose tissue from high fat-fed versus normal chow-fed mice have given results contradictory to those discussed above. Contrary to expectations, cytosolic PEPCK is downregulated in multiple adipose depots of high fat versus normal chow-fed mice. Downregulation of adipose PEPCK was documented at multiple time points in the course of the diet-induced obesity protocol. Our interpretation of these results is that downregulation of PEPCK may be a compensatory response to limit triglyceride deposition. In support of this hypothesis, a number of additional lipogenic genes are downregulated in adipose tissue under conditions of diet-induced obesity, including diacylglycerol transferase 2, monoglyceride lipase, lipoprotein lipase and aquaporin adipose.

[0355] The discordance in PEPCK gene expression in diet-induced obesity versus a genetic model of obesity may be explained by the differences in the two models. In genetic obesity, the pathophysiology is static because it is hard-wired into the organism. In contrast, in diet-induced obesity, the increase in fat mass evolves over a period of 12-16 weeks, and is a result of the increase in high-fat calories. The response to the caloric overload is dynamic (as seen in CuraGen's GeneCalling® studies), and includes compensatory responses by the organism to maintain energy homeostasis and body weight. Such a compensatory response to caloric overload appears to include a downregulation of PEPCK in adipose tissue.

[0356] CuraGen's GeneCalling® studies have also shown an upregulation of cytosolic PEPCK in the liver of mice in the diet-induced obesity model (data included below). The gene is upregulated 1.8-fold in the transition from normoglycemia to hyperglycemia in obese mice. This data strongly supports a pathogenic role for cytosolic PEPCK in the increased hepatic glucose production and hyperglycemia of Type 2 diabetes. It is important to note that more than 90% of patients with Type 2 diabetes are obese. In the diet-induced obesity model, a proportion of the obese mice also develop hyperglycemia and other metabolic disturbances characteristic of Type 2 diabetes. Thus cytosolic PEPCK is also a therapeutic target for Type 2 diabetes.

[0357] The following summarizes the biochemistry surrounding the human cytosolic Phosphoenolpyruvate Carboxykinase (PEPCK) and potential assays that may be used to screen for antibody therapeutics or small molecule drugs to treat obesity and/or diabetes.

[0358] Cytosolic Phosphoenolpyruvate carboxykinase (PEPCK) is an important enzyme in whole-body energy homeostasis and catalyzes the following reaction:
GTP+oxaloacetate=GDP+phosphoenolpyruvate+CO₂

[0359] It is the rate-limiting enzyme in gluconeogenesis in liver and glyceroneogenesis in adipose tissue, participating in the glyceroneogenic pathway in adipocytes when glucose is limiting. Adipose tissue glyceroneogenesis produces glycerol 3-phosphate, which is the substrate for triglyceride deposition. Phosphoenolpyruvate carboxykinase (PEPCK) activity is affected by a number of hormones that regulate this metabolic process, including glucagon, insulin, and glucocorticoids.

[0360] Taken in total, the data indicates that a modulator such as an inhibitor/antagonist of the human cytosolic Phosphoenolpyruvate Carboxykinase (PEPCK) would be beneficial in the treatment of obesity and/or diabetes.

[0361] Furthermore, our results indicate that a modulator of cytosolic Phosphoenolpyruvate Carboxykinase (PEPCK) activity, such as an inhibitor, activator, antagonist, or agonist of PEPCK may be useful for treatment of such disorders as obesity, diabetes, and insulin resistance, as well as for enhancement of insulin secretion.

Discovery Process

[0362] The following sections describe the study design(s) and the techniques used to identify the Cytosolic Phosphoenolpyruvate Carboxykinase (PEPCK)—encoded protein and any variants, thereof, as being suitable as diagnostic markers, targets for an antibody therapeutic and targets for a small molecule drugs for Obesity and Diabetes.

### EXAMPLE A1

### Genetically Obese Mice vs Genetically Lean Mice Study

[0363] A protocol for Genetically Obese Mice vs Genetically Lean Mice Study is disclosed in Example Q6.

[0364] A fragment of the mouse cytosolic Phosphoenolpyruvate carboxykinase (PEPCK) 1 gene (mouse strains AKR, C57BL) was initially found to be up-regulated by 3-fold in the adipose tissue of obese AKR mice relative to lean C57L/J mice using CuraGen's GeneCalling® method of differential gene expression (described in Example Q7). A differentially expressed mouse gene fragment migrating, at approximately 254 nucleotides in length was definitively identified as a component of the mouse Cytosolic Phosphoenolpyruvate carboxykinase (PEPCK) 1 cDNA. The method of competitive PCR was used for confirmation of the gene assessment. The electropherographic peaks corresponding to the gene fragment of the mouse cytosolic Phosphoenolpyruvate carboxykinase (PEPCK) 1 were ablated when a gene-specific primer (shown in Table A1) competes with primers in the linker-adaptors during the PCR amplification. The peaks at 254 nt in length were ablated in the sample from both the obese AKR mice and the normal C57L/J mice.

TABLE A1

The direct sequence of the 254 nucleotide-long gene fragment and the
gene-specific primers used for competitive PCR are indicated on the
cDNA sequence of Cytosolic Phosphoenolpyruvate Carboxykinase (PEPCK)
1 fragment (SEQ ID NO:171) are shown in bold. The gene-specific
+UZ,1/44primers at the 5′ and 3′ ends of the fragment are underlined.
Gene Sequence (fragment from 1442 to 1695 in bold. band size: 254)

961 AAGGCAAGAA GAAATACCTG GCCGCAGCCT TCCCTAGTGC CTGTGGGAAG ACTAACTTGG
1021 CCATGATGAA CCCCAGCCTG CCCGGGTGGA AGGTCGAATG TGTGGGCGAT GACATTGCCT
1081 GGATGAAGTT TGATGCCCAA GGCAACTTAA GGGCTATCAA CCCAGAAAAC GGGTTTTTTG
1141 GAGTTGCTCC TGGCACCTCA GTGAAGACAA ATCCAAATGC CATTAAAACC ATCCAGAAAA
1201 ACACCATCTT CACCAACGTG GCCGAGACTA GCGATGGGGG TGTTTACTGG GAAGGCATCG
1261 ATGAGCCGCT GGCCCCGGGA GTCACCATCA CCTCCTGGAA GAACAAGGAG TGGAGACCGC
1321 AGGACGCGGA ACCATGTGCC CATCCCAACT CGAGATTCTG CACCCCTGCC AGCCAGTGCC
1381 CCATTATTGA CCCTGCCTGG GAATCTCCAG AAGGAGTACC CATTGAGGGT ATCATCTTTG
1441 GTGGCCGTAG ACCTGAAG GT GTCCCCCTTG TCTATGAAGC CCTCACCTGG CAGCATGGGG
1501 TGTTTGTACG AGCAGCCATG AGATCTGAGG CCACACCTCC TCCACAACAC AAGGGCAAGA
1561 TCATCATGCA CGACCCCTTT GCCATCCGAC CCTTCTTCGG CTACAACTTC GGCAAATACC
1621 TGGCCCACTG GCTGACCATC GCCCACCGCC CACCAGCCAA GTTGCCCAAG ATCTTCCATC
1681 TCAACTGCTT CCGGAAGGAC AAAGATGGCA AGTTCCTCTG GCCAGGCTTT GGCGAGAACT
1741 CCCGGGTGCT GGAGTGGATG TTCGGGCGGA TTGAAGGGGA AGACAGCGCC AAGCTCACGC
1801 CCATCGGCTA CATCCCTAAG GAAAACGCCT TGAACCTGAA AGGCCTGGGG GGCGTCAACG
1861 TGGAGGAGCT GTTTGGGATC TCTAAGGAGT TCTGGGAGAA GGAGGTGGAG GAGATCGACA
1921 GGTATCTGGA GGACCAGOTC AACACCGACC TCCCTTACGA AATTGAGAGG GAGCTCCGAG
1981 CCCTGAAACA GAGAATCAGC CAGATGTAAA TCCCAATGGG GGCGTCTCGA GAGTCACCCC
2041 TTCCCACTCA CAGCATCGCT GAGATCTAGG AGAAAGCCAG CCTGCTCCAG CTTTGAGATA
2101 GCGGCACAAT CGTGAGTAGA TCAGAAAAGC ACCTTTTAAT AGTCAGTTGA GTAGCACAGA
2161 GAACAGGCTA GGGGC

(gene length is 2617, only region from 961 to 2175 shown)

### EXAMPLE A2

### Mouse Dietary-Induced Obesity Study

[0365] A protocol for Mouse Dietary-Induced Obesity study is disclosed in Example Q1.

[0366] A large number of mouse strains have been identified that differ in body mass and composition. The AKR and NZB strains are obese, the SWR, C57BL and C57BL/6 strains are of average weight whereas the SM/J and Cast/E1 strains are lean. Understanding the gene expression differences in the major metabolic tissues from these strains will elucidate the pathophysiologic basis for obesity. These specific strains of rat were chosen for differential gene expression analysis because quantitative trait loci (QTL) for body weight and related traits had been reported in published genetic studies. Tissues included whole brain, skeletal muscle, visceral adipose, and liver.

[0367] The predominant cause for obesity in clinical populations is excess caloric intake. This so-called diet-induced obesity (DIO) is mimicked in animal models by feeding high fat diets of greater than 40% fat content. The DIO study was established to identify the gene expression changes contributing to the development and progression of diet-induced obesity. In addition, the study design sought to identify the factors that lead to the ability of certain individuals to resist the effects of a high fat diet and thereby prevent obesity. The sample groups for the study had body weights +1 S.D., +4 S.D. and +7 S.D. of the chow-fed controls. In addition, the biochemical profile of the +7 S.D. mice revealed a further stratification of these animals into mice that retained a normal glycemic profile in spite of obesity and mice that demonstrated hyperglycemia. Tissues examined included hypothalamus, brainstem, liver, retroperitoneal white adipose tissue (WAT), epididymal WAT, brown adipose tissue (BAT), gastrocnemius muscle (fast twitch skeletal muscle) and soleus muscle (slow twitch skeletal muscle). The differential gene expression profiles for these tissues revealed genes and pathways that can be used as therapeutic targets for obesity. Protocol for differential gene expression analysis, GeneCalling®, is disclosed in Example Q7.

Results

[0368] A gene fragment of mouse cytosolic Phosphoenolpyruvate carboxykinase (PEPCK) was found to be down-regulated by 7-fold in the epididymal fat pad (efp) of Ngsd7 (normal glycemic, obese) vs. chow-fed mice in a diet-induced obesity study using CuraGen's GeneCalling® method of differential gene expression. A differentially expressed mouse gene fragment migrating, at approximately 349 nucleotides in length was definitively identified as a component of the mouse cytosolic Phosphoenolpyruvate carboxykinase (PEPCK) cDNA. The method of competitive PCR was used for confirmation of the gene assessment. The electropherographic peaks corresponding to the gene fragment of the mouse cytosolic Phosphoenolpyruvate carboxykinase (PEPCK) were ablated when a gene-specific primer (shown in Table A2) competes with primers in the linker-adaptors during the PCR amplification. The peaks at 349 nt in length were ablated in the sample from both the Ngsd7 and chow-fed mice. In addition, the mouse cytosolic Phosphoenolpyruvate carboxykinase (PEPCK) gene is down-regulated in the retroperitoneal fat pad (rfp) of Ngsd7 (normal glycemic, obese) and Hgsd7 (hyperglycemic, obese) versus Sd1 or chow-fed mice. It should be noted that the downregulation of this gene in adipose in a dietary-induced obesity model may be a compensatory response to limit triglyceride deposition and adiposity.

TABLE A2

The direct sequence of the 349 nucleotide-long gene fragment and the
gene-specific primers used for competitive PCR are indicated on the
cDNA sequence of the cytosolic Phosphoenolpyruvate Carboxykinase
(PEPCK) fragment (SEQ ID NO:172) are shown in bold. The gene-specific
primers at the 5′ and 3′ ends of the fragment are underlined.
Gene Sequence (fragment from 2077 to 2425 in bold. band size: 349)
1596 CCATGCGACC CTTCTTCGGC TACAACTTCG GCAAATACCT GGCCCACTGG CTGAGCATGG
1656 CCCACCGCCC AGCAGCCAAG TTGCCCAAGA TCTTCCATGT CAACTGGTTC CGGAAGGACA
1716 AAGATGGCAA GTTCCTCTGG CCAGGCTTTG GCGAGAACTC CCGGGTGCTG GAGTGGATGT
3776 TCGGGCGGAT TGAAGGGGAA GACAGCGCCA AGCTCACGCC CATCGGCTAC ATCCCTAAGG
1836 AAAACGCCTT GAACCTGAAA GGCCTGGGGG GCGTCAACGT GGAGGAGCTG TTTGGGATCT
1896 CTAAGGAGTT CTGGGAGAAG GAGGTGGAGG AGATCGACAG GTATCTGGAG GACCAGGTCA
1956 ACACCGACCT CCCTTACGAA ATTGAGAGGG AGCTCCGAGC CCTGAAACAG AGAATCAGCC
2016 AGATGTAAAT CCCAATGGGG GCGTCTCGAG AGTCACCCCT TCCCACTCAC AGCATGCGCT
2076 GAGATCTACG AGAAAGCCAG CCTGCTCCAG CTTTGAGATA CCGGCACAAT GCTGAGTAGA
2136 TCAGAAAAGC ACCTTTTAAT AGTCACTTGA GTAGCACACA GAACAGGCTA GGGGCAAATA
2196 AGATTGGGAG GGGAAATCAC CGCATAGTCT CTGAAGTTTG CATTTGACAC CAATGCGGGT
2256 TTTGGTTCCA CTTCAACGTC ACTCAGGAAT CCAGTTCTTC ACGTTAGCTG TACCAGTTAG
2316 CTAAAATGCA CAGAAAACAT ACTTGAGCTG TATATATGTG TGTGAACGTG TCTCTGTGTG
2376 AGCATGTGTG TGTGTGTGTG TGTGTGTGTG TGTGTGTGTG TGTCTGTACA TGCCTGTCTG
2436 TCCCATTGTC CACAGTATAT TTAAAACCTT TGGGGAAAAA TCTTGGGCAA ATTTGTAGCT
2496 GTAACTAGAG AGTCATGTTG CTTTGTTGCT AGTATGTATG TTTAAATTAT TTTTATACAC
2556 CGCCCTTCCT TACCTTTCTT TACATAATTG AAATTGGTAT CCGGACCACT TCTTGGGAAA
2616 AAAATTACAA AATAAACTTT TATAGAAAAA GTAAAAAAAA AAAAAAAA

(gene length is 2663, only region from 1596 to 2663 shown)

[0369] Our data also showed that cytosolic PEPCK is downregulated 1.8-fold in the liver of Ngsd7 (normal glycemia and obese) versus Hgsd7 (hyperglycemic and obese) mice in the diet-induced obesity study. Identitiy of the PEPCK as the downregulated gene was then confirmed by TrapPing technology (disclosed in Example Q7). Therefore, PEPCK is upregulated in Hgsd7 liver versus Ngsd7 liver. Thus, PEPCK upregulation occurs at the transition between normal glycemia and the pathologic change to hyperglycemia. Since PEPCK is the rate-controlling step in the process of hepatic gluconeogenesis (production of glucose from non-glucose substrates), the data suggests that upregulation of PEPCK is a critical step in the evolution to hyperglycemia and Type 2 diabetes.

### EXAMPLE A3

### Identification of Human PEPCK Sequence

[0370] The sequence of Human PEPCK (Acc. No. CG101190-01) was derived by laboratory cloning of cDNA fragments, by in silico prediction of the sequence. cDNA fragments covering either the full length of the DNA sequence, or part of the sequence, or both, were cloned. In silico prediction was based on sequences available in CuraGen's proprietary sequence databases or in the public human sequence databases, and provided either the full-length DNA sequence, or some portion thereof. The protocol for identification of human sequence(s) is disclosed in Example Q8.

[0371] Table A3 shows an alignment (ClustalW) of the protein sequences of the human (CG101190-01), rat (PPCC_MOUSE=Q9Z2V4) and mouse (PPCC_RAT=P07379) versions of the cytosolic Phosphoenolpyruvate Carboxykinase (PEPCK). Table A4 shows sequences of rat (PPCC_MOUSE=Q9Z2V4; SEQ ID NO:174) and mouse (PPCC_RAT=P07379; SEQ ID NO:173) versions of the cytosolic Phosphoenolpyruvate Carboxykinase (PEPCK).

[image]

TABLE A5

>PPCC_MOUSE (SEQ ID NO:173)
MPPQLHNGLDFSAKVIQGSLDSLPQAVRKFVEGNAQLCQPEYIHICDGSEEEYGQLLAHMQEEGVIRKLK
KYDNCWLALTDPRDVARIESKTVIITQEQRDTVPIPKTGLSQLGRWMSEEDFEKAFNARFPGCMKGRTMY
VIPFSMGPLGSPLAKIGIELTDSPYVVASMRIMTRMGISVLEALGDGEFIKCLHSVGCPLPLKKPLVNNW
ACNPELTLIAHLPDRREIISFGSGYGGNSLLGKKCFALRIASRLAKEEGWLAEHMLILGITNPEGKKKYL
AAAFPSACGKTNLAMMNPSLPGWKVECVGDDIAWMKFDAQGNLRAINPENGFFGVAPGTSVKTNPNAIKT
IQKNTIFTNVAETSDGGVYWEGIDEPLAPGVTITSWKNKEWRPQDAEPCAHPNSRFCTPASQCPILDPAW
ESPEGVPIEGIIFGGRRPEGVPLVYEALSWQHGVFVGAAMRSEATAAAEHKGKIIMHDPFAMRPFFGYNF
GKYLAHWLSMAHRPAAKLPKIFHVNWFRKDKDGKFLWPGFGENSRVLEWMFGRIEGEDSAKLTPIGYIPK
ENALNLKGLGGVNVEELFGISKEFWEKEVEEIDRYLEDQVNTDLPYEIERELRALKQRISQM
>PPCC_RAT (SEQ IN NO:174)
MPPQLHNGLDFSAKVIQGSLDSLPQEVRKFVEGNAQLCQPEYIHICDGSEEEYGRLLAHMQEEGVIRKLK
KYDNCWLALTDPRDVARIESKTVIITQEQRDTVPIPKSGQSQLGRWMSEEDFEKAFNARFPGCMKGRTMY
VIPFSMGPLGSPLAKIGIELTDSPYVVASMRIMTRMGTSVLEALGDGEFIKCLHSVGCPLPLKKPLVNNW
ACNPELTLIAHLPDRREIISFGSGYGGNSLLGKKCFALRIASRLAKEEGWLAEHMLILGITNPEGKKKYL
AAAFPSACGKTNLAMMNPTLPGWKVECVGDDIAWMKFDAQGNLRAINPENGFFGVAPGTSVKTNPNAIKT
IQKNTIFTNVAETSDGGVYWEGLDEPLAPGVTITSWKNKEWRPQDEEPCAHPNSRFCTPASQCPIIDPAW
ESPEGVPIEGIIFGGRRPAGVPLVYEALSWQHGVFVGAAMRSEATAAAEHKGKVIMHDPFAMRPFFGYNF
GKYLAHWLSMAHRPAAKLPKIFHVNWFRKDKNGKFLWPGFGENSRVLEWMFGRLEGEDSAKLTPIGYVPK
EDALNLKGLGDVNVEELFGISKEFWEKEVEELDKYLEDQVNADLPYELERELRALKQRISQM

[0372] The laboratory cloning was performed using one or more of the methods summarized in Example Q8. The NOV1 clone was analyzed, and the nucleotide and encoded polypeptide sequences are shown in Table A6.

TABLE A6
NOV1 Sequence Analysis

| | | |
|---|---|---|
| NOV1a, CG101190-01 | SEQ ID NO:1 | 2070 bp |
| DNA Sequence | ORF Start: ATG at 119 | ORF Stop: TAA at 1985 |

GAACACAAACTTGCTGGCGGGAAGAGCCCGGAAAGAAACCTGTGGATCTCCCTTCGAGATCATCCAAA
GAGAAGAAAGGTGACCTCACATTCGTGCCCCTTAGCAGCACTCTGCAGAAATGCCTCCTCAGCTGCAA
AACGGCCTGAACCTCTCGGCCAAAGTTGTCCAGGGAAGCCTGGACAGCCTGCCCCAGGCAGTGAGGGA
GTTTCTCGAGAATAACGCTGAGCTGTGTCAGCCTGATCACATCCACATCTGTGACGGCTCTGAGGAGG
AGAATGGGCGGCTTCTGGGCCAGATGGAGGAAGAGGGCATCCTCAGGCGGCTGAAGAAGTATGACAAC
TGCTGGTTGGCTCTCACTGACCCCAGGGATGTGGCCAGGATCGAAAGCAAGACGGTTATCGTCACCCA
AGAGCAAAGAGACACAGTGCCCATCCCCAAAACAGGCCTCAGCCAGCTCGGTCGCTGGATGTCAGAGG
AGGATTTTGAGAAAGCGTTCAATGCCAGGTTCCCAGGGTGCATGAAAGGTCGCACCATGTACGTCATC
CCATTCAGCATGGGGCCGCTGGGCTCACCTCTGTCGAAGATCGGCATCGAGCTGACGGATTCGCCCTA
CGTGGTGGCCAGCATGCGGATCATGACGCGGATGGGCACGCCCGTCCTGGAAGCACTGGGCGATGGGG
AGTTTGTCAAATGCCTCCATTCTGTGGGGTGCCCTCTGCCTTTACAAAAGCCTTTGGTCAACAACTGG
CCCTGCAACCCGGAGCTGACGCTCATCGCCCACCTGCCTGACCGCAGAGAGATCATCTCCTTTGGCAG
TGGGTACGGCGGGAACTCGCTGCTCGGGAAGAAGTGCTTTGCTCTCAGGATGGCCAGCCGGCTGGCCA
AGGAGGAAGGGTGGCTGGCAGAGCACATGCTGATTCTGGGTATAACCAACCCTGAGGGTGAGAAGAAG
TACCTGGCGGCCGCATTTCCCAGCGCCTGCGGGAAGACCAACCTGGCCATGATGAACCCCAGCCTCCC
CGGGTGGAAGGTTGAGTGCGTCGGGGATGACATTGCCTGGATGAAGTTTGACGCACAAGGTCATTTAA
GGGCCATCAACCCAGAAAATGGCTTTTTCGGTGTCGCTCCTGGGACTTCAGTGAAGACCAACCCCAAT
GCCATCAAGACCATCCAGAAGAACACAATCTTTACCAATGTGGCCGAGACCAGCGACGGGGGCGTTTA
CTGGGAAGGTATTGATGAGCCGCTAGCTTCAGGCGTCACCATCACGTCCTGGAAGAATAAGGAGTGGA
GCTCAGAGGATGGGGAACCTTGTGCCCACCCCAACTCGAGGTTCTGCACCCCTGCCAGCCAGTGCCCC
ATCATTGATGCTGCCTGGGAGTCTCCGGAAGGTGTTCCCATTGAAGGCATTATCTTTGGAGGCCGTAG
ACCTGCTGGTGTCCCTCTAGTCTATGAAGCTCTCAGCTGGCAACATGGAGTCTTTGTGGGGGCGGCCA
TGAGATCAGAGGCCACAGCGGCTGCAGAACATAAAGGCAAAATCATCATGCATGACCCCTTTGCCATG
CGGCCCTTCTTTGGCTACAACTTCGGCAAATACCTGGCCCACTGGCTTAGCATGGCCCAGCACCCAGC
AGCCAAACTGCCCAAGATCTTCCATGTCAACTGGTTCCGGAAGGACAAGGAAGGCAAATTCCTCTGGC
CAGGCTTTGGAGAGAACTCCAGGGTGCTGGAGTGGATGTTCAACCGGATCGATGGAAAAGCCAGCACC
AAGCTCACGCCCATAGGCTACATCCCCAAGGAGGATGCCCTGAACCTGAAAGGCCTGGGGCACATCAA
CATGATGGAGCTTTTCAGCATCTCCAAGGAATTCTGGGAGAAGGAGGTGGAAGACATCGAGAAGTATC
TGGAGGATCAAGTCAATGCCGACCTCCCCTGTGAAATCGAGAGAGAGATCCTTGCCTTGAAGCAAAGA
ATAAGCCAGATGTAATCAGGGCCTGAGTGCTTTACCTTTAAAATCATTCCCTTTCCCATCCATAAGGT
GCAGTAGGAGCAAGAGAGGGCAAGTGTTCC

| | | | |
|---|---|---|---|
| NOV1a, CG101190-01 | | | |
| Protein Sequence | SEQ ID NO:2 | 622 aa | MW at 69207.8 kD |

MPPQLQNGLNLSAKVVQGSLDSLPQAVREFLENNAELCQPDHIHICDGSEEENGRLLGQMEEEGILRR
LKKYDNCWLALTDPRDVARIESKTVIVTQEQRDTVPIPKTGLSQLGRWMSEEDFEKAFNARFPGCMKG
RTMYVIPFSMGPLGSPLSKIGIELTDSPYVVASMRIMTRMGTPVLEALGDGEFVKCLHSVGCPLPLQK
PLVNNWPCNPELTLIAHLPDRREIISFGSGYGGNSLLGKKCFALRMASRLAKEEGWLAEHMLILGITN
PEGEKKYLAAAFPSACGKTNLAMNNPSLPGWKVECVGDDIAWMKFDAQGHLRAINPENGFFGVAPGTS
VKTNPNAIKTIQKNTIFTNVAETSDGGVYWEGIDEPLASGVTITSWKNKEWSSEDGEPCAHPNSRFCT
PASQCPIIDAAWESPEGVPIEGIIFGGRRPAGVPLVYEALSWQHGVFVGAAMRSEATAAAEHKGKIIM
HDPFAMRPFFGYNFGKYLAHWLSMAQHPAAKLPKIFHVNWFRKDKEGKFLWPGFGENSRVLEWMFNRI
DGKASTKLTPIGYIPKEDALNLKGLGHINMMELFSISKEFWEKEVEDIEKYLEDQVNADLPCEIEREI
LALKQRISQM

| | | |
|---|---|---|
| NOV1b, 278992806 | SEQ ID NO:3 | 1888 bp |
| DNA Sequence | ORF Start: at 2 | ORF Stop: end of sequence |

CACCGGATCCACCATGCCTCCTCAGCTGCAAAACGGCCTGAACCTCTCGGCCAAAGTTGTCCAGGGAA
GCCTGGACAGCCTGCCCCAGGCAGTGAGGGAGTTTCTCGAGAATAACGCTGAGCTGTGTCAGCCTGAT
CACATCCACATCTGTGACGGCTCTGAGGAGGAGAATGGGCGGCTTCTGGGCCAGATGGAGGAAGAGGG
CATCCTCAGGCGACTGAAGAAGTATGACAACTGCTGGTTGGCTCTCACTGACCCCAGGGATGTGGCCA
GGATCGAAAGCAAGACGGTTATCGTCACCCAAGAGCAAAGAGACACAGTGCCCATCCCCAAAACAGGC
CTCAGCCAGCTCGGTCGCTGGATGTCAGAGGAGGATTTTGAGAAAGCGTTCAATGCCAGGTTCCCAGG
GTGCATGAAAGGTCGCACCATGTACGTCATCCCATTCAGCATGGGGCCGCTGGGCTCACCTCTGTCGA
AGATCGGCATCGAGCTGACGGATTCGCCCTACGTGGTGGCCAGCATGCGGATCATGACGCGGATGGGC
ACGCCCGTCCTGGAAGCACTGGGCGATGGGGAGTTTGTCAAATGCCTCCATTCTGTGGGGTGCCCTCT
GCCTTTACAAAAGCCTTTGGTCAACAACTGGCCCTGCAACCCGGAGCTGACGCTCATCGCCCACCTGC
CTGACCGCAGAGAGATCATCTCCTTTGGCAGTGGGTACGGCGGGAACTCGCTGCTCGGGAAGAAGTGC
TTTGCTCTCAGGATGGCCAGCCGGCTGGCCAAGGAGGAAGGGTGGCTGGCAGAGCACATGCTGATTCT
GGGTATAACCAACCCTGAGGGTGAGAAGAAGTACCTGGCGGCCGCATTTCCCAGCGCCTGCGGGAAGA
CCAACCTGGCCATGATGAACCCCAGCCTCCCCGGGTGGAAGGTTGAGTGCGTCGGGGATGACATTGCC
TGGATGAAGTTTGACGCACAAGGTCATTTAAGGGCCATCAACCCAGAAAATGGCTTTTTCGGTGTCGC
TCCTGGGACTTCAGTGAAGACCAACCCCAATGCCATCAAGACCATCCAGAAGAACACAATCTTTACCA
ATGTGGCCGAGACCAGCGACGGGGGCGTTTACTGGGAAGGTATTGATGAGCCGCTAGCTTCAGGCGTC
ACCATCACGTCCTGGAAGAATAAGGAGTGGAGCTCAGAGGATGGGGAACCTTGTGCCCACCCCAACTC
GAGGTTCTGCACCCCTGCCAGCCAGTGCCCCATCATTGATGCTGCCTGGGAGTCTCCGGAAGGTGTTC
CCATTGAAGGCATTATCTTTGGAGGCCGTAGACCTGCTGGTGTCCCTCTAGTCTATGAAGCTCTCAGC
TGGCAACATGGAGTCTTTGTGGGGGCGGCCATGAGATCAGAGGCCACAGCGGCTGCAGAACATAAAGG
CAAAATCATCATGCATGACCCCTTTGCCATGCGGCCCTTCTTTGGCTACAACTTCGGCAAATACCTGG
CCCACTGGCTTAGCATGGCCCAGCACCCAGCAGCCAAACTGCCCAAGATCTTCCATGTCAACTGGTTC
CGGAAGGACAAGGAAGGCAAATTCCTCTGGCCAGGCTTTGGAGAGAACTCCAGGGTGCTGGAGTGGAT
GTTCAACCGGATCGATGGAAAAGCCAGCACCAAGCTCACGCCCATAGGCTACATCCCCAAGGAGGATG
CCCTGAACCTGAAAGGCCTGGGGCACATCAACATGATGGAGCTTTTCAGCATCTCCAAGGAATTCTGG
GAGAAGGAGGTGGAGACATCGAGAAGTATCTGGAGGATCAAGTCAATGCCGACCTCCCCTGTGAAAT
CGAGAGAGAGATCCTTGCCTTGAAGCAAAGAATAAGCCAGATGGTCGACGGC

| | | | |
|---|---|---|---|
| NOV1b, 278992806 | | | |
| Protein Sequence | SEQ ID NO:4 | 629 aa | MW at 69825.4 kD |

TGSTMPPQLQNGLNLSAKVVQGSLDSLPQAVREFLENNAELCQPDHIHICDGSEEENGRLLGQMEEEG
ILRRLKKYDNCWLALTDPRDVARIESKTVIVTQEQRDTVPIPKTGLSQLGRWMSEEDFEKAFNARFPG
CMKGRTMYVIPFSMGPLGSPLSKIGIELTDSPYVVASMRIMTRMGTPVLEALGDGEFVKCLHSVGCPL
PLQKPLVNNWPCNPELTLIAHLPDRREIISFGSGYGGNSLLGKKCFALRMASRLAKEEGWLAEHMLIL
GITNPEGEKKYLAAAFPSACGKThLAMMNPSLPGWKVECVGDDIAWMKFDAQGHLRAINPENGFFGVA
PGTSVKTNPNAIKTIQKNTIFTNVAETSDGGVYWEGIDEPLASGVTITSWKNKEWSSEDGEPCAHPNS
RFCTPASQCPIIDAAWESPEGVPIEGIIFGGRRPAGVPLVYEALSWQHGVFVGAANRSEATAAAEHKG
KIIMHDPFAMRPFFGYNFGKYLAHWLSMAQHPAAKLPKIFHVNWFRKDKEGKFLWPGFGENSRVLEWM
FNRIDGKASTKLTPIGYIPKEDALNLKGLGHINMMELFSISKEFWEKEVEDIEKYLEDQVNADLPCEI
EREILALKQRISQMVDG

| | | |
|---|---|---|
| NOV1c, 278992862 | SEQ ID NO:5 | 1801 bp |
| DNA Sequence | ORF Start: at 2 | ORF Stop: end of sequence |

CACCGGATCCGAGTTTCTCGAGAATAACGCTGAGCTGTGTCAGCCTGATCACATCCACATCTGTGACG
GCTCTGAGGAGGAGAATGGGCGGCTTCTGGGCCAGATGGAGGAAGAGGGCATCCTCAGGCGACTGAAG
AAGTATGACAACTGCTGGTTGGCTCTCACTGACCCCAGGGATGTGGCCAGGATCGAAAGCAAGACGGT
TATCGTCACCCAAGAGCAAAGAGACACAGTGCCCATCCCCAAAACAGGCCTCAGCCAGCTCGGTCGCT
GGATGTCAGAGGAGGATTTTGAGAAAGCGTTCAATGCCAGGTTCCCAGGGTGCATGAAAGGTCGCACC
ATGTACGTCATCCCATTCAGCATGGGGCCGCTGGGCTCACCTCTGTCGAAGATCGGCATCGAGCTGAC
GGATTCGCCCTACGTGGTGGCCAGCATGCGGATCATGACGCGGATGGGCACGCCCGTCCTGGAAGCAC
TGGGCGATGGGGAGTTTGTCAAATGCCTCCATTCTGTGGGGTGCCCTCTGCCTTTACAAAAGCCTTTG
GTCAACAACTGGCCCTGCAACCCGGAGCTGACGCTCATCGCCCACCTGCCTGACCGCAGAGAGATCAT
CTCCTTTGGCAGTGGGTACGGCGGGAACTCGCTGCTCGGGAAGAAGTGCTTTGCTCTCAGGATGGCCA
GCCGGCTGGCCAAGGAGGAAGGGTGGCTGGCAGAGCACATGCTGATTCTGGGTATAACCAACCCTGAG
GGTGAGAAGAAGTACCTGGCGGCCGCATTTCCCAGCGCCTGCGGGAAGACCAACCTGGCCATGATGAA
CCCCAGCCTCCCCGGGTGGAAGGTTGAGTGCGTCGGGGATGACATTGCCTGGATGAAGTTTGACGCAC
AAGGTCATTTAAGGGCCATCAACCCAGAAAATGGCTTTTTCGGTGTCGCTCCTGGGACTTCAGTGAAG
ACCAACCCCAATGCCATCAAGACCATCCAGAAGAACACAATCTTTACCAATGTGGCCGAGACCAGCGA
CGGGGGCGTTTACTGGGAAGGTATTGATGAGCCGCTAGCTTCAGGCGTCACCATCACGTCCTGGAAGA
ATAAGGAGTGGAGCTCAGAGGATGGGGAACCTTGTGCCCACCCCAACTCGAGGTTCTGCACCCCTGCC
AGCCAGTGCCCCATCATTGATGCTGCCTGGGAGTCTCCGGAAGGTGTTCCCATTGAAGGCATTATCTT
TGGAGGCCGTAGACCTGCTGGTGTCCCTCTAGTCTATGAAGCTCTCAGCTGGCAACATGGAGTCTTTG
TGGGGGCGGCCATGAGATCAGAGGCCACAGCGGCTGCAGAACATAAAGGCAAAATCATCATGCATGAC
CCCTTTGCCATGCGGCCCTTCTTTGGCTACAACTTCGGCAAATACCTGGCCCACTGGCTTAGCATGGC
CCAGCACCCAGCAGCCAAACTGCCCAAGATCTTCCATGTCAACTGGTTCCGGAAGGACAAGGAAGGCA
AATTCCTCTGGCCAGGCTTTGGAGAGAACTCCAGGGTGCTGGAGTGGATGTTCAACCGGATCGATGGA
AAAGCCAGCACCAAGCTCACGCCCATAGGCTACATCCCCAAGGAGGATGCCCTGAACCTGAAAGGCCT
GGGGCACATCAACATGATGGAGCTTTTCAGCATCTCCAAGGAATTCTGGGAGAAGGAGGTGGAAGACA
TCGAGAAGTATCTGGAGGATCAAGTCAATGCCGACCTCCCCTGTGAAATCGAGAGAGAGATCCTTGCC
TTGAAGCAAAGAATAAGCCAGATGGTCGACGGC

| | | | |
|---|---|---|---|
| NOV1c, 278992862 | | | |
| Protein Sequence | SEQ ID NO:6 | 600 aa | MW at 66780.9 kD |

TGSEFLENNAELCQPDHIHICDGSEEEMGRLLGQMEEEGILRRLKKYDNCWLALTDPRDVARIESKTV
IVTQEQRDTVPIPKTGLSQLGRWMSEEDFEKAFNARFPGCMKGRTMYVIPFSMGPLGSPLSKIGIELT
DSPYVVASMRIMTRMGTPVLEALGDGEFVKCLHSVGCPLPLQKPLVNNWPCNPELTLIAHLPDRREII
SFGSGYGGNSLLGKKCFALRMASRLAKEEGWLAEHMLILGITNPEGEKKYLAAAFPSACGKTNLANMN
PSLPGWKVECVGDDIAWMKFDAQGHLRAINPENGFFGVAPGTSVKTNPNAIKTIQKNTIFTNVAETSD
GGVYWEGIDEPLASGVTITSWKNKEWSSEDGEPCAHPNSRFCTPASQCPIIDAAWESPEGVPIEGIIF
GGRRPAGVPLVYEALSWQHGVFVGAAMRSEATAAAEHKGKIIMHDPFAMRPFFGYNFGKYLAHWLSMA
QHPAAKLPKIFHVNWFRKDKEGKFLWPGFGENSRVLEWMFNRIDGKASTKLTPIGYIPKEDALNLKGL
GHINMNELFSISKEFWEKEVEDIEKYLEDQVNADLPCEIEREILALKQRISQMVDG

[0373] A ClustalW comparison of the above protein sequences yields the following sequence alignment shown in Table A7.

TABLE A7
Comparison of the NOV1 protein sequences

| | |
|---|---|
| NOV1a | ————MPPQLQNGLNLSAKVVQGSLDSLPQAVREFLENNAELCQPDHIHICDGSEEENGRL |
| NOV1b | TGSTMPPQLQNGLNLSAKVVQGSLDSLPQAVREFLENNAELCQPDHIHICDGSEEENGRL |
| NOV1c | —————————————————————————————TGSEFLENNAELCQPDHIHICDGSEEENGRL |
| NOV1a | LGQMEEEGILRRLKKYDNCWLALTDPRDVARIESKTVIVTQEQRDTVPIPKTGLSQLGRW |
| NOV1b | LGQMEEEGILRRLKKYDNCWLALTDPRDVARIESKTVIVTQEQRDTVPIPKTGLSQLGRW |
| NOV1c | LGQMEEEGILRRLKKYDNCWLALTDPRDVARIESKTVIVTQEQRDTVPIPKTGLSQLGRW |
| NOV1a | MSEEDFEKAFNARFPGCMKGRTMYVIPFSMGPLGSPLSKIGIELTDSPYVVASMRIMTRM |
| NOV1b | MSEEDFEKAFNARFPGCMKGRTMYVIPFSMGPLGSPLSKIGIELTDSPYVVASMRIMTRM |
| NOV1c | MSEEDFEKAFNARFPGCMKGRTMYVIPFSMGPLGSPLSKIGIELTDSPYVVASMRIMTRM |
| NOV1a | GTPVLEALGDGEFVKCLHSVGCPLPLQKPLVNNWPCNPELTLIAHLPDRREIISFGSGYG |
| NOV1b | GTPVLEALGDGEFVKCLHSVGCPLPLQKPLVNNWPCNPELTLIAHLPDRREIISFGSGYG |
| NOV1c | GTPVLEALGDGEFVKCLHSVGCPLPLQKPLVNNWPCNPELTLIAHLPDRREIISFGSGYG |
| NOV1a | GNSLLGKKCFALRMASRLAKEEGWLAEHMLILGITNPEGEKKYLAAAFPSACGKTNLAMM |
| NOV1b | GNSLLGKKCFALRMASRLAKEEGWLAEHMLILGITNPEGEKKYLAAAFPSACGKTNLAMM |
| NOV1c | GNSLLGKKCFALRMASRLAKEEGWLAEHMLILGITNPEGEKKYLAAAFPSACGKTNLAMM |
| NOV1a | NPSLPGWKVECVGDDIAWMKFDAQGHLRAINPENGFFGVAPGTSVKTNPNAIKTIQKNTI |
| NOV1b | NPSLPGWKVECVGDDIAWMKFDAQGHLRAINPENGFFGVAPGTSVKTNPNAIKTIQKNTI |
| NOV1c | NPSLPGWKVECVGDDIAWMKFDAQGHLRAINPENGFFGVAPGTSVKTNPNAIKTIQKNTI |
| NOV1a | FTNVAETSDGGVYWEGIDEPLASGVTITSWKNKEWSSEDGEPCAHPNSRFCTPASQCPII |
| NOV1b | FTNVAETSDGGVYWEGIDEPLASGVTITSWKNKEWSSEDGEPCAHPNSRFCTPASQCPII |
| NOV1c | FTNVAETSDGGVYWEGIDEPLASGVTITSWKNKEWSSEDGEPCAHPNSRFCTPASQCPII |
| NOV1a | DAAWESPEGVPIEGIIFGGRRPAGVPLVYEALSWQHGVFVGAANRSEATAAAEHKGKIIM |
| NOV1b | DAAWESPEGVPIEGIIFGGRRPAGVPLVYEALSWQHGVFVGAAMRSEATAAAEHKGKIIM |
| NOV1c | DAAWESPEGVPIEGIIFGGRRPAGVPLVYEALSWQHGVFVGAAMRSEATAAAEHKGKIIM |
| NOV1a | HDPFAMRPFFGYNFGKYLAHWLSMAQHPAAKLPKIFHVNWFRKDKEGKFLWPGFGENSRV |
| NOV1b | HDPFAMRPFFGYNFGKYLAHWLSMAQHPAAKLPKIFHVNWFRKDKEGKFLWPGFGENSRV |
| NOV1c | HDPFAMRPFFGYNFGKYLAHWLSMAQHPAAKLPKIFHVNWFRKDKEGKFLWPGFGENSRV |
| NOV1a | LEWMFNRIDGKASTKLTPIGYIPKEDALNLKGLGHINMMELFSISKEFWEKEVEDIEKYL |
| NOV1b | LEWMFNRIDGKASTKLTPIGYIPKEDALNLKGLGHINMMELFSISKEFWEKEVEDIEKYL |
| NOV1c | LEWMFNRIDGKASTKLTPIGYIPKEDALNLKGLGHINMMELFSISKEFWEKEVEDIEKYL |
| NOV1a | EDQVNADLPCEIEREILALKQRISQM——— |
| NOV1b | EDQVNADLPCEIEREILALKQRISQMVDG |
| NOV1C | EDQVNADLPCEIEREILALKQRISQMVDG |
| NOV1a | (SEQ ID NO:2) |
| NOV1b | (SEQ ID NO:4) |
| NOV1c | (SEQ ID NO:6) |

[0374] Further analysis of the NOV1a protein yielded the following properties shown in Table A8.

TABLE A8
Protein Sequence Properties NOV1a

| SignalP | No Known Signal Sequence Predicted | | | |
|---|---|---|---|---|
| analysis: | | | | |
| PSORT II | PSG: a new signal peptide prediction method | | | |
| analysis: | N-region: length 0; pos. chg 0; neg. chg 0 | | | |
| | H-region: length 13; peak value −1.95 | | | |
| | PSG score: −6.35 | | | |
| | GvH: von Heijne's method for signal seq. recognition | | | |
| | GvH score (threshold: −2.1): −10.13 | | | |
| | possible cleavage site: between 17 and 18 | | | |
| | >>> Seems to have no N-terminal signal peptide | | | |
| | ALOM: Klein et al's method for TM region allocation | | | |
| | Init position for calculation: 1 | | | |
| | Tentative number of TMS(s) for the threshold 0.5: 0 | | | |
| | number of TMS(s) . . . fixed | | | |
| | PERIPHERAL Likelihood = 6.42 (at 280) | | | |
| | ALOM score: 6.42 (number of TMSs: 0) | | | |
| | MITDISC: discrimination of mitochondrial targeting seq | | | |
| | R content: | 0 | Hyd Moment(75): | 3.20 |
| | Hyd Moment(95): | 6.24 | G content: | 2 |
| | D/E content: | 1 | S/T content: | 2 |

Score: −5.73
Gavel: prediction of cleavage sites for mitochondrial preseq
cleavage site motif not found
NUCDISC: discrimination of nuclear localization signals
pat4: none
pat7: none
bipartite: none
content of basic residues: 10.6%
NLS Score: −0.47
KDEL: ER retention motif in the C-terminus: none
ER Membrane Retention Signals: none
SKL: peroxisomal targeting signal in the C-terminus: none
PTS2: 2nd peroxisomal targeting signal: none
VAC: possible vacuolar targeting motif: found
KLPK at 507
RNA-binding motif: none
Actinin-type actin-binding motif:
type 1: none
type 2: none
NMYR: N-myristoylation pattern: none
Prenylation motif: none
memYQRL: transport motif from cell surface to Golgi: none
Tyrosines in the tail: none
Dileucine motif in the tail: none
checking 63 PROSITE DNA binding motifs: none
checking 71 PROSITE ribosomal protein motifs: none
checking 33 PROSITE prokaryotic DNA binding motifs: none
NNCN: Reinhardt's method for Cytoplasmic/Nuclear
discrimination
Prediction: cytoplasmic
Reliability: 89
COIL: Lupas's algorithm to detect coiled-coil regions
total: 0 residues
Final Results (k = 9/23):
43.5%: nuclear
34.8%: cytoplasmic
17.4%: mitochondrial
4.3%: vacuolar
>> prediction for CG101190-01 is nuc (k = 23)

[0375] A search of the NOV1a protein against the Geneseq database, a proprietary database that contains sequences published in patents and patent publication, yielded several homologous proteins shown in Table A9.

TABLE A9
Geneseq Results for NOV1a

| | | NOV1a | Identities/ | |
|---|---|---|---|---|
| | | Residues/ | Similarities for | |
| Geneseq | Protein/Organism/Length | Match | the Matched | Expect |
| Identifier | [Patent #, Date] | Residues | Region | Value |
| AAB71880 | Human PEPCK-cytosolic protein - | 1 . . . 622 | 617/622 (99%) | 0.0 |
| | Homo sapiens, 622 aa. [US6187545- | 1 . . . 622 | 620/622 (99%) | |
| | B1, 13-FEB-2001] | | | |
| AAB71890 | Mouse PEPCK-cytosolic protein - | 1 . . . 622 | 566/622 (90%) | 0.0 |
| | Mus musculus, 622 aa. [US6187545- | 1 . . . 622 | 596/622 (94%) | |
| | B1, 13-FEB-2001] | | | |
| AAY80296 | Human mitochondrial | 14 . . . 622 | 437/610 (71%) | 0.0 |
| | phosphoenolpyruvate carboxykinase | 31 . . . 640 | 514/610 (83%) | |
| | SEQ ID NO: 1 - Homo sapiens, 640 | | | |
| | aa. [US6030837-A, 29-FEB-2000] | | | |
| ABJ37938 | NOVX protein sequence SEQ ID No | 14 . . . 622 | 411/610 (67%) | 0.0 |
| | 121 - Unidentified, 608 aa. | 31 . . . 608 | 485/610 (79%) | |
| | [WO200281517-A2, 17-OCT-2002] | | | |
| ABB65318 | Drosophila melanogaster polypeptide | 18 . . . 622 | 397/610 (65%) | 0.0 |
| | SEQ ID NO 22746 - Drosophila | 43 . . . 647 | 477/610 (78%) | |
| | melanogaster, 647 aa. | | | |
| | [WO200171042-A2, 27-SEP-2001] | | | |

[0376] In a BLAST search of public sequence databases, the NOV1a protein was found to have homology to the proteins shown in the BLASTP data in Table A10.

TABLE A10
Public BLASTP Results for NOV1a

| | | NOV1a | Identities/ | |
|---|---|---|---|---|
| Protein | | Residues/ | Similarities for | |
| Accession | | Match | the Matched | Expect |
| Number | Protein/Organism/Length | Residues | Portion | Value |
| P35558 | Phosphoenolpyruvate carboxykinase, | 1 . . . 622 | 622/622 (100%) | 0.0 |
| | cytosolic [GTP] (EC 4.1.1.32) | 1 . . . 622 | 622/622 (100%) | |
| | (Phosphoenolpyruvate carboxylase) | | | |
| | (PEPCK-C) - Homo sapiens | | | |
| | (Human), 622 aa. | | | |
| A45746 | phosphoenolpyruvate carboxykinase | 1 . . . 622 | 620/622 (99%) | 0.0 |
| | (GTP) (EC 4.1.1.32) 1 - human, 622 aa. | 1 . . . 622 | 621/622 (99%) | |
| P07379 | Phosphoenolpyruvate carboxykinase, | 1 . . . 622 | 566/622 (90%) | 0.0 |
| | cytosolic [GTP] (EC 4.1.1.32) | 1 . . . 622 | 596/622 (94%) | |
| | (Phosphoenolpyruvate carboxylase) | | | |
| | (PEPCK-C) - Rattus norvegicus | | | |
| | (Rat), 622 aa. | | | |
| Q9Z2V4 | Phosphoenolpyruvate carboxykinase, | 1 . . . 622 | 566/622 (90%) | 0.0 |
| | cytosolic [GTP] (EC 4.1.1.32) | 1 . . . 622 | 596/622 (94%) | |
| | (Phosphoenolpyruvate carboxylase) | | | |
| | (PEPCK-C) - Mus musculus | | | |
| | (Mouse), 622 aa. | | | |
| Q8BSX3 | Phosphoenolpyruvate carboxykinase | 1 . . . 622 | 566/622 (90%) | 0.0 |
| | 1 - Mus musculus (Mouse), 622 aa. | 1 . . . 622 | 595/622 (94%) | |

[0377] PFam analysis predicts that the NOV1a protein contains the domains shown in the Table A11.

TABLE A11
Domain Analysis of NOV1a

| | | Identities/ | |
|---|---|---|---|
| Pfam | NOV1a | Similarities for | Expect |
| Domain | Match Region | the Matched Region | Value |
| PEPCK | 29 . . . 622 | 434/612 (71%) | 0 |
| | | 567/612 (93%) | |

### EXAMPLE A4

### Human Cytosolic Phosphoenolpyruvate Carboxykinase (PEPCK) Gene Variants and SNPs

[0378] Variant sequences are included in this application. A variant sequence can include a single nucleotide polymorphism (SNP). A SNP can, in some instances, be referred to as a “cSNP” to denote that the nucleotide sequence containing the SNP originates as a cDNA. A SNP can arise in several ways. For example, a SNP may be due to a substitution of one nucleotide for another at the polymorphic site. Such a substitution can be either a transition or a transversion. A SNP can also arise from a deletion of a nucleotide or an insertion of a nucleotide, relative to a reference allele. In this case, the polymorphic site is a site at which one allele bears a gap with respect to a particular nucleotide in another allele. SNPs occurring within genes may result in an alteration of the amino acid encoded by the gene at the position of the SNP. Intragenic SNPs may also be silent, however, in the case that a codon including a SNP encodes the same amino acid as a result of the redundancy of the genetic code. SNPs occurring outside the region of a gene, or in an intron within a gene, do not result in changes in any amino acid sequence of a protein but may result in altered regulation of the expression pattern for example, alteration in temporal expression, physiological response regulation, cell type expression regulation, intensity of expression, stability of transcribed message.

[0379] Method of novel SNP Identification: SNPs are identified by analyzing sequence assemblies using CuraGen's proprietary SNPTool algorithm. SNPTool identifies variation in assemblies with the following criteria: SNPs are not analyzed within 10 base pairs on both ends of an alignment; Window size (number of bases in a view) is 10; The allowed number of mismatches in a window is 2; Minimum SNP base quality (PHRED score) is 23; Minimum number of changes to score an SNP is 2/assembly position. SNPTool analyzes the assembly and displays SNP positions, associated individual variant sequences in the assembly, the depth of the assembly at that given position, the putative assembly allele frequency, and the SNP sequence variation. Sequence traces are then selected and brought into view for manual validation. The consensus assembly sequence is imported into CuraTools along with variant sequence changes to identify potential amino acid changes resulting from the SNP sequence variation. Comprehensive SNP data analysis is then exported into the SNPCalling database.

[0380] Method of novel SNP Confirmation: SNPs are confirmed employing a validated method know as Pyrosequencing. Detailed protocols for Pyrosequencing can be found in: Alderborn et al. Determination of Single Nucleotide Polymorphisms by Real-time Pyrophosphate DNA Sequencing. (2000). Genome Research. 10, Issue 8, August. 1249-1265.

[0381] In brief, Pyrosequencing is a real time primer extension process of genotyping. This protocol takes double-stranded, biotinylated PCR products from genomic DNA samples and binds them to streptavidin beads. These beads are then denatured producing single stranded bound DNA. SNPs are characterized utilizing a technique based on an indirect bioluminometric assay of pyrophosphate (PPi) that is released from each dNTP upon DNA chain elongation. Following Klenow polymerase-mediated base incorporation, PPi is released and used as a substrate, together with adenosine 5′-phosphosulfate (APS), for ATP sulfurylase, which results in the formation of ATP. Subsequently, the ATP accomplishes the conversion of luciferin to its oxi-derivative by the action of luciferase. The ensuing light output becomes proportional to the number of added bases, up to about four bases. To allow processivity of the method dNTP excess is degraded by apyrase, which is also present in the starting reaction mixture, so that only dNTPs are added to the template during the sequencing. The process has been fully automated and adapted to a 96-well format, which allows rapid screening of large SNP panels.

Results

[0382] The DNA and protein sequences for the novel single nucleotide polymorphic variants of the phosphoenolpyruvate carboxykinase-like gene of CuraGen Acc. No. CG101190-01 are reported in Table A12. Variants are reported individually but any combination of all or a select subset of variants are also included. In Table A12, the positions of the variant bases and the variant amino acid residues are underlined. In summary, there are 16 variants reported in Table A12. Variant 13374203 is a G to A SNP at 187 bp of the nucleotide sequence that results in no change in the protein sequence (silent), variant 13374204 is a G to A SNP at 322 bp of the nucleotide sequence that results in no change in the protein sequence (silent), variant 13374205 is a C to T SNP at 400 bp of the nucleotide sequence that results in no change in the protein sequence (silent), variant 13374206 is a C to G SNP at 668 bp of the nucleotide sequence that results in a Leu to Val change at amino acid 184 of protein sequence, variant 13378862 is a G to A SNP at 868 bp of the nucleotide sequence that results in a Met to Ile change at amino acid 250 of protein sequence, variant 13380271 is an A to G SNP at 917 bp of the nucleotide sequence that results in an Ile to Val change at amino acid 267 of protein sequence, variant 13378861 is a G to A SNP at 944 bp of the nucleotide sequence that results in a Glu to Lys change at amino acid 276 of protein sequence, variant 13379542 is a C to T SNP at 1258 bp of the nucleotide sequence that results in no change in the protein sequence (silent), variant 13378352 is a C to A SNP at 1339 bp of the nucleotide sequence that results in a Cys to Stop change at amino acid 407 of protein sequence, variant 13375322 is an A to G SNP at 1680 bp of the nucleotide sequence that results in a Lys to Arg change at amino acid 521 of protein sequence, variant 13375321 is an A to G SNP at 1731 bp of the nucleotide sequence that results in a Glu to Gly change at amino acid 538 of protein sequence, variant 13375320 is a T to C SNP at 1773 bp of the nucleotide sequence that results in a Leu to Pro change at amino acid 552 of protein sequence, variant 13375319 is a T to C SNP at 1848 bp of the nucleotide sequence that results in a Leu to Pro change at amino acid 577 of protein sequence, variant 13375318 is a T to C SNP at 1857 bp of the nucleotide sequence that results in an Ile to Thr change at amino acid 580 of protein sequence, variant 13377375 is an A to G SNP at 1887 bp of the nucleotide sequence that results in a Glu to Gly change at amino acid 590 of protein sequence, and variant 13377374 is a T to C SNP at 1929 bp of the nucleotide sequence that results in a Leu to Pro change at amino acid 604 of protein sequence.

TABLE A12
Variants of nucleotide sequence of
Acc. No. CG101190-01 (SEQ ID NO: 1)

| | Nucleotides | | | Amino Acids | | |
|---|---|---|---|---|---|---|
| Variant | Position | Initial | Modified | Position | Initial | Modified |
| 13374203 | 187 | G | A | 23 | Leu | Leu |
| 13374204 | 322 | G | A | 68 | Arg | Arg |
| 13374205 | 400 | C | T | 94 | Ile | Ile |
| 13374206 | 668 | C | G | 184 | Leu | Val |
| 13378862 | 868 | G | A | 250 | Met | Ile |
| 13380271 | 917 | A | G | 267 | Ile | Val |
| 13378861 | 944 | G | A | 276 | Glu | Lys |
| 13379542 | 1258 | C | T | 380 | Gly | Gly |
| 13378352 | 1339 | C | A | 407 | Cys | STOP |
| 13375322 | 1680 | A | G | 521 | Lys | Arg |
| 13375321 | 1731 | A | G | 538 | Glu | Gly |
| 13375320 | 1773 | T | C | 552 | Leu | Pro |
| 13375319 | 1848 | T | C | 577 | Leu | Pro |
| 13375318 | 1857 | T | C | 580 | Ile | Thr |
| 13377375 | 1887 | A | G | 590 | Glu | Gly |
| 13377374 | 1929 | T | C | 604 | Leu | Pro |

[0383] TABLE A13
Variant Sequences

```
Table A13A1.
Nucleotide sequence of variant 13374203 NOV1a1n (underlined). G/A (SEQ ID NO:79)
      1 GAACACAAACTTGCTGGCGGGAAGAGCCCGGAAAGAAACCTGTGGATCTCCCTTCGAGATCATCCAAAGAGAAGAAAGGT
    81 GACCTCACATTCGTGCCCCTTAGCAGCACTCTGCAGAAATGCCTCCTCAGCTGCAAAACGGCCTGAACCTCTCGGCCAAA
  161 GTTGTCCAGGGAAGCCTGGACAGCCTACCCCAGGCAGTGAGGGAGTTTCTCGAGAATAACGCTGAGCTGTGTCAGCCTGA
  241 TCACATCCACATCTGTGACGGCTCTGAGGAGGAGAATGGGCGGCTTCTGGGCCAGATGGAGGAAGAGGGCATCCTCAGGC
  321 GGCTGAAGAAGTATGACAACTGCTGGTTGGCTCTCACTGACCCCAGGGATGTGGCCAGGATCGAAAGCAAGACGGTTATC
  401 GTCACCCAAGAGCAAAGAGACACAGTGCCCATCCCCAAAACAGGCCTCAGCCAGCTCGGTCGCTGGATGTCAGAGGAGGA
  481 TTTTGAGAAAGCGTTCAATGCCAGGTTCCCAGGGTGCATGAAAGGTCGCACCATGTACGTCATCCCATTCAGCATGGGGC
  561 CGCTGGGCTCACCTCTGTCGAAGATCGGCATCGAGCTGACGGATTCGCCCTACGTGGTGGCCAGCATGCGGATCATGACG
  641 CGGATGGGCACGCCCGTCCTGGAAGCACTGGGCGATGGGGAGTTTGTCAAATGCCTCCATTCTGTGGGGTGCCCTCTGCC
  721 TTTACAAAAGCCTTTGGTCAACAACTGGCCCTGCAACCCGGAGCTGACGCTCATCGCCCACCTGCCTGACCGCAGAGAGA
  801 TCATCTCCTTTGGCAGTGGGTACGGCGGGAACTCGCTGCTCGGGAAGAAGTGCTTTGCTCTCAGGATGGCCAGCCGCCTG
  881 GCCAAGGAGGAAGGGTGGCTGGCAGAGCACATGCTGATTCTGGGTATAACCAACCCTGAGGGTGAGAAGAAGTACCTGGC
  961 GGCCGCATTTCCCAGCGCCTGCGGGAAGACCAACCTGGCCATGATGAACCCCAGCCTCCCCGGGTGGAAGGTTGAGTGCG
1041 TCGGGGATGACATTGCCTGGATGAAGTTTGACGCACAAGGTCATTTAAGGGCCATCAACCCAGAAAATGGCTTTTTCGGT
1121 GTCGCTCCTGGGACTTCAGTGAAGACCAACCCCAATGCCATCAAGACCATCCAGAAGAACACAATCTTTACCAATGTGGC
1201 CGAGACCAGCGACGGGGGCGTTTACTGGGAAGGTATTGATGAGCCGCTAGCTTCAGGCGTCACCATCACGTCCTGGAAGA
1281 ATAAGGAGTGGAGCTCAGAGGATGGGGAACCTTGTGCCCACCCCAACTCGAGGTTCTGCACCCCTGCCAGCCAGTGCCCC
1361 ATCATTGATGCTGCCTGGGAGTCTCCGGAAGGTGTTCCCATTGAAGGCATTATCTTTGGAGGCCGTAGACCTGCTGGTGT
1441 CCCTCTAGTCTATGAAGCTCTCAGCTGGCAACATGGAGTCTTTGTGGGGGCGGCCATGAGATCAGAGGCCACAGCGGCTG
1521 CAGAACATAAAGGCAAAATCATCATGCATGACCCCTTTGCCATGCGGCCCTTCTTTGGCTACAACTTCGGCAAATACCTG
1601 GCCCACTGGCTTAGCATGGCCCAGCACCCAGCAGCCAAACTGCCCAAGATCTTCCATGTCAACTGGTTCCGGAAGGACAA
1681 GGAAGGCAAATTCCTCTGGCCAGGCTTTGGAGAGAACTCCAGGGTGCTGGAGTGGATGTTCAACCGGATCGATGGAAAAG
1761 CCAGCACCAAGCTCACGCCCATAGGCTACATCCCCAAGGAGGATGCCCTGAACCTGAAAGGCCTGGGGCACATCAACATG
1841 ATGGAGCTTTTCAGCATCTCCAAGGAATTCTGGGAGAAGGAGGTGCAAGACATCGAGAAGTATCTGGAGGATCAAGTCAA
1921 TGCCGACCTCCCCTGTGAAATCGAGAGAGAGATCCTTGCCTTGAAGCAAAGAATAAGCCAGATGTAATCAGGGCCTGAGT
2001 GCTTTACCTTTAAAATCATTCCCTTTCCCATCCATAAGGTGCAGTAGGAGCAAGAGAGGGCAAGTGTTCC
Table A13A2. Protein sequence of variant NOV1a1p (underlined). (SEQ ID NO:80)
      1 MPPQLQNGLNLSAKVVQGSLDSLPQAVREFLENNAELCQPDHIHICDGSEEENGRLLGOMEEEGILRRLKKYDNCWLALT
    81 DPRDVARIESKTVIVTQEQRDTVPIPKTGLSQLGRWMSEEDFEKAFNARFPGCMKGRTMYVIPFSMGPLGSPLSKIGIEL
  161 TDSPYVVASMRIMTRNGTPVLEALGDGEPVKCLHSVGCPLPLQKPLVNNWPCNPELTLIAHLPDRREIISFGSGYGGNSL
  241 LGKKCFALRMASRLAKEEGWLAEHMLILGITNPEGEKXYLAAAFPSACGKTNLANMNPSLPGWKVECVGDDIAWMKFDAQ
  321 GHLRAINPENGFFGVAPGTSVKTNPNAIKTIQKNTIFTNVAETSDGGVYWEGIDEPLASGVTITSWKNKEWSSEDGEPCA
401 HPNSRFCTPASQCPIIDAAWESPEGVPIEGIIFGGRRPAGVPLVYEALSWQHGVFVGAANRSEATAAAEHKGKIIMHDPF
481 ANRPFFGYNFGKYLAHWLSMAQHPAAKLPKIFHVNWFRKDKEGKFLWPGFGENSRVLEWNFNRIDGKASTKLTPIGYIPK
561 EDALNLKGLGHINMMELFSISKEFWEKEVEDIEKYLEDQVNADLPCEIEREILALKQRISQM
Table A13A3. Alteration effect
No change.
Table A13B1.
Nucleotide sequence of variant 13374204 NOV1a2n (underlined). G/A (SEQ ID NO:81)
      1 GAACACAAACTTGCTGGCGGGAAGAGCCCGGAAAGAAACCTGTGGATCTCCCTTCGAGATCATCCAAAGAGAAGAAAGGT
    81 GACCTCACATTCGTGCCCCTTAGCAGCACTCTGCAGAAATGCCTCCTCAGCTGCAAAACGGCCTGAACCTCTCGGCCAAA
  161 GTTGTCCAGGGAAGCCTGGACAGCCTGCCCCAGGCAGTGAGGGAGTTTCTCGAGAATAACGCTGAGCTGTGTCAGCCTGA
  241 TCACATCCACATCTGTGACGGCTCTGAGGAGGAGAATGGGCGGCTTCTGGGCCAGATGGAGGAAGAGGGCATCCTCAGGC
  321 GACTGAAGAAGTATGACAACTGCTGGTTGGCTCTCACTGACCCCAGGGATGTGGCCAGGATCGAAAGCAAGACGGTTATC
  401 GTCACCCAAGAGCAAAGAGACACAGTGCCCATCCCCAAAACAGGCCTCAGCCAGCTCGCTCGCTGGATGTCAGAGGAGGA
  481 TTTTGAGAAAGCGTTCAATGCCAGGTTCCCAGGGTGCATGAAAGGTCGCACCATGTACGTCATCCCATTCAGCATGGGGC
  561 CGCTGGGCTCACCTCTGTCGAAGATCGGCATCGAGCTGACGGATTCGCCCTACGTGGTGGCCAGCATGCGGATCATGACG
  641 CGGATGGGCACGCCCGTCCTGGAAGCACTGGGCGATGGGGAGTTTGTCAAATGCCTCCATTCTGTGGGGTGCCCTCTGCC
  721 TTTACAAAAGCCTTTGGTCAACAACTGGCCCTGCAACCCGGAGCTGACGCTCATCGCCCACCTGCCTGACCGCAGAGAGA
  801 TCATCTCCTTTGGCAGTGGGTACGGCGGGAACTCGCTGCTCGGGAAGAAGTGCTTTGCTCTCAGGATGGCCAGCCGGCTG
  881 GCCAAGGAGGAAGGGTGGCTGGCAGAGCACATGCTGATTCTGGGTATAACCAACCCTGAGGGTGAGAAGAAGTACCTGGC
  961 GGCCGCATTTCCCAGCGCCTGCGGGAAGACCAACCTGGCCATGATGAACCCCAGCCTCCCCGGGTGGAAGGTTGAGTGCG
1041 TCGGGGATGACATTGCCTGGATGAAGTTTGACGCACAAGGTCATTTAAGGGCCATCAACCCAGAAAATGGCTTTTTCGGT
1121 GTCGCTCCTGGGACTTCAGTGAAGACCAACCCCAATGCCATCAAGACCATCCAGAAGAACACAATCTTTACCAATGTGGC
1201 CGAGACCAGCGACGGGGGCGTTTACTGGGAAGGTATTGATGAGCCGCTAGCTTCAGGCGTCACCATCACGTCCTGGAAGA
1281 ATAAGGAGTGGAGCTCAGAGGATGGGGAACCTTGTGCCCACCCCAACTCGAGGTTCTGCACCCCTGCCAGCCAGTGCCCC
1361 ATCATTGATGCTGCCTGGGAGTCTCCGGAAGGTGTTCCCATTGAAGGCATTATCTTTGGAGGCCGTAGACCTGCTGGTGT
1441 CCCTCTAGTCTATGAAGCTCTCAGCTGGCAACATGGAGTCTTTGTGGGGGCGGCCATGAGATCAGAGGCCACAGCGGCTG
1521 CAGAACATAAAGGCAAAATCATCATGCATGACCCCTTTGCCATGCGGCCCTTCTTTGGCTACAACTTCGGCAAATACCTG
1601 GCCCACTGGCTTAGCATGGCCCAGCACCCAGCAGCCAAACTGCCCAAGATCTTCCATGTCAACTGGTTCCGGAAGGACAA
1681 GGAAGGCAAATTCCTCTGGCCAGGCTTTGGAGAGAACTCCAGGGTGCTGGAGTGGATGTTCAACCGGATCGATGGAAAAG
1761 CCAGCACCAAGCTCACGCCCATAGGCTACATCCCCAAGGAGGATGCCCTGAACCTGAAAGGCCTGGGGCACATCAACATG
1841 ATGGAGCTTTTCAGCATCTCCAAGGAATTCTGGGAGAAGGAGGTGGAAGACATCGAGAAGTATCTGGAGGATCAAGTCAA
1921 TGCCGACCTCCCCTGTGAAATCGAGAGAGAGATCCTTGCCTTGAAGCAAAGAATAAGCCAGATGTAATCAGGGCCTGAGT
2001 GCTTTACCTTTAAAATCATTCCCTTTCCCATCCATAAGGTGCAGTAGGAGCAAGAGAGGGCAAGTGTTCC
Table A13B2. Protein sequence of variant NOV1a2p (underlined). (SEQ ID NO:82)
      1 MPPQLQNGLNLSAKVVQGSLDSLPQAVREFLENNAELCQPDHIHICDGSEEENGRLLGQMEEEGILRRLKKYDNCWLALT
    81 DPRDVARIESKTVIVTQEQRDTVPIPKTGLSQLGRWMSEEDFEKAFNARFPGCMKGRTMYVIPFSMGPLGSPLSKIGIEL
  161 TDSPYVVASMRIMTRNGTPVLEALGDGEFVKCLHSVGCPLPLQKPLVNNWPCNPELTLIAHLPDRREIISFGSGYGGNSL
  241 LGKKCFALRMASRLAKEEGWLAEHMLILGITNPEGEKKYLAAAFPSACGKTNLANMNPSLPGWKVECVGDDIAWNKFDAQ
  321 GHLRAINPENGFFGVAPGTSVKTNPHAIKTIQKNTIFTNVAETSDGGVYWEGIDEPLASGVTITSWKNKEWSSEDGEPCA
  401 HPNSRFCTPASOCPIIDAAWESPEGVPIEGIIFGGRRPAGVPLVYEALSWQHGVFVGAANRSEATAAAEHKGKIIMHDPF
  481 ANRPFFGYNFGKYLAHWLSMAQHPAAKLPKIFHVNWFRKDKEGKFLWPGFGENSRVLEWMFNRIDGKASTKLTPIGYIPK
  561 EDALNLKGLGHINMMELFSISKEFWEKEVEDIEKYLEDQVNADLPCEIEREILALKQRISQM
Table A13B3. Alteration effect
No change.
Table A13C1.
Nucleotide sequence of variant 13374205 NOV1a3n (underlined). C/T (SEQ ID NO:83)
      1 GAACACAAACTTGCTGGCGGGAAGAGCCCGGAAAGAAACCTGTGGATCTCCCTTCGAGATCATCCAAAGAGAAGAAAGGT
    81 GACCTCACATTCGTGCCCCTTAGCAGCACTCTGCAGAAATGCCTCCTCAGCTGCAAAACGGCCTGAACCTCTCGGCCAAA
  161 GTTGTCCAGGGAAGCCTGGACAGCCTGCCCCAGGCAGTGAGGGAGTTTCTCGAGAATAACGCTGAGCTGTGTCAGCCTGA
  241 TCACATCCACATCTGTGACGGCTCTGAGGAGGAGAATGGGCGGCTTCTCGGCCAGATGGAGGAAGAGGGCATCCTCAGGC
  321 GGCTGAAGAAGTATGACAACTGCTGGTTGGCTCTCACTGACCCCAGGGATGTGGCCAGGATCGAAAGCAAGACGGTTATT
  401 GTCACCCAAGAGCAAAGAGACACAGTGCCCATCCCCAAAACAGGCCTCAGCCAGCTCGGTCGCTGGATGTCAGAGGAGGA
  481 TTTTGAGAAAGCGTTCAATGCCAGGTTCCCAGGGTGCATGAAAGGTCGCACCATGTACGTCATCCCATTCAGCATGGGGC
  561 CGCTGGGCTCACCTCTGTCGAAGATCGGCATCGAGCTGACGGATTCGCCCTACGTGGTGGCCAGCATGCGGATCATGACG
  641 CGGATGGGCACGCCCGTCCTGGAAGCACTGGGCGATGGGGAGTTTGTCAAATGCCTCCATTCTGTGGGGTGCCCTCTGCC
  721 TTTACAAAAGCCTTTGGTCAACAACTGGCCCTGCAACCCGGAGCTGACGCTCATCGCCCACCTGCCTGACCGCAGAGAGA
  801 TCATCTCCTTTGGCAGTGGGTACGGCGGGAACTCGCTGCTCGGGAAGAAGTGCTTTGCTCTCAGGATGGCCAGCCGGCTG
  881 GCCAAGGAGGAAGGGTGGCTGGCAGAGCACATGCTGATTCTGGGTATAACCAACCCTGAGGGTGAGAAGAAGTACCTGGC
  961 GGCCGCATTTCCCAGCGCCTGCGGGAAGACCAACCTGGCCATGATGAACCCCAGCCTCCCCGGGTGGAAGGTTGAGTGCG
1041 TCGGGGATGACATTGCCTGGATGAAGTTTGACGCACAAGGTCATTTAAGGGCCATCAACCCAGAAAATGGCTTTTTCGGT
1121 GTCGCTCCTGGGACTTCAGTGAAGACCAACCCCAATGCCATCAAGACCATCCAGAAGAACACAATCTTTACCAATGTGGC
1201 CGAGACCAGCGACGGGGGCGTTTACTGGGAAGGTATTGATGAGCCGCTAGCTTCAGGCGTCACCATCACGTCCTGGAAGA
1281 ATAAGGAGTCGAGCTCAGAGGATGGGGAACCTTGTGCCCACCCCAACTCGAGGTTCTGCACCCCTGCCAGCCAGTGCCCC
1361 ATCATTGATGCTGCCTGGGAGTCTCCGGAAGGTGTTCCCATTGAAGGCATTATCTTTGGAGGCCGTAGACCTGCTGGTGT
1441 CCCTCTAGTCTATGAAGCTCTCAGCTGGCAACATGGAGTCTTTGTGGGGGCGGCCATGAGATCAGAGGCCACAGCGGCTG
1521 CAGAACATAAAGGCAAAATCATCATGCATGACCCCTTTGCCATGCGGCCCTTCTTTGGCTACAACTTCGGCAAATACCTG
1601 GCCCACTGGCTTAGCATGGCCCAGCACCCAGCAGCCAAACTGCCCAAGATCTTCCATGTCAACTGGTTCCGGAAGGACAA
1681 GGAAGGCAAATTCCTCTGGCCAGGCTTTGGAGAGAACTCCAGGGTGCTGGAGTGGATGTTCAACCGGATCGATGGAAAAG
1761 CCAGCACCAAGCTCACGCCCATAGGCTACATCCCCAAGGAGGATGCCCTGAACCTGAAAGGCCTGGGGCACATCAACATG
1841 ATGGAGCTTTTCAGCATCTCCAAGGAATTCTGGGAGAAGGAGGTGGAAGACATCGAGAAGTATCTGGAGGATCAAGTCAA
1921 TGCCGACCTCCCCTGTGAAATCGAGAGAGAGATCCTTGCCTTCAAGCAAAGAATAAGCCAGATGTAATCAGGGCCTGAGT
2001 GCTTTACCTTTAAAATCATTCCCTTTCCCATCCATAAGGTGCAGTAGGAGCAAGAGAGGGCAAGTGTTCC
Table A13C2. Protein sequence of variant NOV1a3p (underlined). (SEQ ID NO:84)
      1 MPPQLQNGLNLSAKVVQGSLDSLPQAVREFLENNAELCQPDHIHICDGSEEENGRLLGQMEEEGILRRLKKYDNCWLALT
    81 DPRDVARIESKTVIVTQEQRDTVPIPKTGLSQLGRWMSEEDFEKAFNARFPGCMKGRTMYVIPFSMGPLGSPLSKIGIEL
  161 TDSPYVVASMRIMTRMGTPVLEALGDGEFVKCLHSVGCPLPLQKPLVWNWPCNPELTLIAHLPDRREIISFGSGYGGWSL
  241 LGKKCFALRMASRLAKEECWLAEHMLILGITNPEGEKKYLAAAFPSACGKTNLANMNPSLPGWKVECVGDDIAWMKFDAQ
  321 GHLRAINPENGFFGVAPGTSVKTNPNAIKTIOKNTIFTNVAETSDGGVYWEGIDEPLASGVTITSWKNKEWSSEDGEPCA
  401 HPNSRFCTPASQCPIIDAAWESPEGVPIEGIIFGGRRPAGVPLVYEALSWQHGVFVGAAMRSEATAAAEHKGKIIMHDPF
  481 AMRPFFGYNFGKYLAHWLSMAQHPAAKLPKIFHVNWFRKDKEGKFLWPGFGENSRVLEWMFNRIDGKASTKLTPIGYIPK
  561 EDALNLKGLGHINNMELPSISKEFWEKEVEDIEKYLEDQVNADLPCEIEREILALKQRISQM
Table A13C3. Alteration effect
No change.
Table A13D1.
Nucleotide sequence of variant 13374206 NOV1a4n (underlined). G/G (SEQ ID NO:85)
      1 GAACACAAACTTGCTGGCGGGAAGAGCCCGGAAAGAAACCTGTGGATCTCCCTTCGAGATCATCCAAAGAGAAGAAAGGT
    81 GACCTCACATTCGTGCCCCTTAGCAGCACTCTGCAGAAATGCCTCCTCAGCTGCAAAACGGCCTGAACCTCTCGGCCAAA
  161 GTTGTCCAGGGAAGCCTGGACAGCCTGCCCCAGGCAGTGAGGGAGTTTCTCGAGAATAACGCTGAGCTGTGTCAGCCTGA
  241 TCACATCCACATCTGTGACGGCTCTGAGGAGGAGAATGGGCGGCTTCTGGGCCAGATGGAGGAAGAGGGCATCCTCAGGC
  321 GGCTGAAGAAGTATGACAACTGCTGGTTGGCTCTCACTGACCCCAGGGATGTGGCCAGGATCGAAAGCAAGACGGTTATC
  401 GTCACCCAAGAGCAAAGAGACACAGTGCCCATCCCCAAAACAGGCCTCAGCCAGCTCGGTCGCTGGATGTCAGAGGAGGA
  481 TTTTGAGAAAGCGTTCAATGCCAGGTTCCCAGGGTGCATGAAAGGTCGCACCATGTACGTCATCCCATTCAGCATGGGGC
  561 CGCTGGGCTCACCTCTGTCGAAGATCGGCATCGAGCTGACGGATTCGCCCTACGTGGTGGCCAGCATGCGGATCATGACG
  641 CGGATGGGCACGCCCGTCCTGGAAGCAGTGGGCGATGGGGAGTTTGTCAAATGCCTCCATTCTGTGGGGTGCCCTCTGCC
  721 TTTACAAAAGCCTTTGGTCAACAACTGGCCCTGCAACCCGGAGCTGACGCTCATCGCCCACCTGCCTGACCGCAGAGAGA
  801 TCATCTCCTTTGGCAGTGGGTACGGCGGGAACTCGCTGCTCGGGAAGAAGTGCTTTGCTCTCAGCATGGCCAGCCGGCTG
  881 GCCAAGGAGGAAGGGTGGCTGGCAGAGCACATGCTGATTCTGGGTATAACCAACCCTGAGGGTGAGAAGAAGTACCTGGC
  961 GGCCGCATTTCCCAGCGCCTGCGGGAAGACCAACCTGGCCATGATGAACCCCAGCCTCCCCGGGTGGAAGGTTGAGTGCG
1041 TCGGGGATGACATTGCCTGGATGAAGTTTGACGCACAAGGTCATTTAAGGGCCATCAACCCAGAAAATGGCTTTTTCGGT
1121 GTCGCTCCTGGGACTTCAGTGAAGACCAACCCCAATGCCATCAAGACCATCCAGAAGAACACAATCTTTACCAATGTGGC
1201 CGAGACCAGCGACGGGGGCGTTTACTGGGAAGGTATTGATGAGCCGCTAGCTTCAGGCGTCACCATCACGTCCTGGAAGA
1281 ATAAGGAGTGGAGCTCAGAGGATGGGGAACCTTGTGCCCACCCCAACTCGAGGTTCTGCACCCCTGCCAGCCAGTGCCCC
1361 ATCATTGATGCTGCCTGGGAGTCTCCGGAAGGTGTTCCCATTGAAGGCATTATCTTTGGAGGCCGTAGACCTGCTGGTGT
1441 CCCTCTAGTCTATGAAGCTCTCAGCTGGCAACATGGAGTCTTTGTGGGGGCGGCCATGAGATCAGAGGCCACAGCGGCTG
1521 CAGAACATAAAGGCAAAATCATCATGCATGACCCCTTTGCCATGCGGCCCTTCTTTGGCTACAACTTCGGCAAATACCIG
1601 GCCCACTGGCTTAGCATGGCCCAGCACCCAGCAGCCAAACTGCCCAAGATCTTCCATGTCAACTGGTTCCGGAAGGACAA
1681 GGAAGGCAAATTCCTCTGGCCAGGCTTTGGAGAGAACTCCAGGGTGCTGGAGTGGATGTTCAACCGGATCGATGGAAAAG
1761 CCAGCACCAAGCTCACGCCCATAGGCTACATCCCCAAGGAGGATGCCCTGAACCTGAAAGGCCTGGGGCACATCAACATG
1841 ATGGAGCTTTTCAGCATCTCCAAGGAATTCTGGGAGAAGGAGGTGGAAGACATCGAGAAGTATCTGGAGGATCAACTCAA
1921 TGCCGACCTCCCCTGTGAAATCQAGAGAGAGATCCTTGCCTTGAAGCAAAGAATAAGCCAGATGTAATCAGGGCCTGAGT
2001 GCTTTACCTTTAAAATCATTCCCTTTCCCATCCATAAGGTGCAGTAGGAGCAAGAGAGGGCAAGTGTTCC
Table A13D2. Protein sequence of variant NOV1a4p (underlined). (SEQ ID NO:86)
      1 MPPQLQNGLNLSAKVVOGSLDSLPQAVREFLENNAELCQPDHIHICDGSEEENGRLLGQMEEEGILRRLKKYDNCWLALT
    81 DPRDVARIESKTVIVTQEQRDTVPIPKTGLSQLGRWHSEEDFEKAFNARFPGCMKGRTMYVIPFSMGPLGSPLSKIGIEL
  161 TDSPYVVASMRIMTRNGTPVLEAVGDGEFVKCLHSVGCPLPLQKPLVNNWPCNPELTLIAHLPDRREIISFGSGYGGNSL
  241 LGKKCFALRMASRLAKEEGWLAEHMLILGITNPEGEKKYLAAAFPSACGKTNLAMMNPSLPGWKVECVGDDIAWMKFDAQ
  321 GHLRAINPENGFFGVAPGTSVKTNPNAIKTIQKNTIFINVAETSDGGVYWEGIDEPLASGVTITSWKNKEWSSEDGEPCA
  401 HPHSRFCTPASQCPIIDAAWESPEGVPIEGIIFGGRRPAGVPLVYEALSWQHGVFVGAANRSEATAAAEHKGKIIMHDPF
  481 ANRPFFGYNFGKYLAHWLSMAQHPAAKLPKIFHVNWFRKDKEGKFLWPGFGENSRVLEWMFNRIDGKASTKLTPIGYIPK
  561 EDALNLKGLGHINMMELFSISKEFWEKEVEDIEKYLEDQVNADLPCEIEREILALKQRISQM
Table A13D3. Alteration effect
Leu to Val
Table A13E1.
Nucleotide sequence of variant 13378862 NOV1a5n (underlined). G/A (SEQ ID NO:87)
      1 GAACACAAACTTGCTGGCGGGAAGAGCCCGGAAAGAAACCTGTGGATCTCCCTTCGAGATCATCCAAAGAGAAGAAAGGT
    81 GACCTCACATTCGTGCCCCTTAGCAGCACTCTGCAGAAATGCCTCCTCAGCTGCAAAACGGCCTGAACCTCTCGGCCAAA
  161 GTTGTCCAGGGAAGCCTGGACAGCCTGCCCCAGGCAGTGAGGGAGTTTCTCGAGAATAACGCTGAGCTGTGTCAGCCTGA
  241 TCACATCCACATCTGTGACGGCTCTGAGGAGGAGAATGGGCGGCTTCTGGGCCAGATGGAGGAAGAGGGCATCCTCAGGC
  321 GGCTGAAGAAGTATGACAACTGCTGGTTGGCTCTCACTGACCCCAGGGATGTGGCCAGGATCGAAAGCAAGACGGTTATC
  401 GTCACCCAAGAGCAAAGAGACACAGTGCCCATCCCCAAAACAGGCCTCAGCCAGCTCGGTCGCTGGATGTCAGAGGAGGA
  481 TTTTGAGAAAGCGTTCAATGCCAGGTTCCCAGGGTGCATGAAAGGTCGCACCATGTACGTCATCCCATTCAGCATGGGGC
  561 CGCTGGGCTCACCTCTGTCGAAGATCGGCATCGAGCTGACGGATTCGCCCTACGTGGTGGCCAGCATGCGGATCATGACG
  641 CGGATGGGCACGCCCGTCCTGGAAGCACTGGGCGATGGGGAGTTTGTCAAATGCCTCCATTCTGTGGGGTGCCCTCTGCC
  721 TTTACAAAAGCCTTTGGTCAACAACTGGCCCTGCAACCCGGAGCTGACGCTCATCGCCCACCTGCCTGACCGCAGAGAGA
  801 TCATCTCCTTTGGCAGTGGGTACGGCGGGAACTCGCTGCTCGGGAAGAAGTGCTTTGCTCTCAGGATAGCCAGCCGGCTG
  881 GCCAAGGAGGAAGGGTGGCTGGCAGAGCACATGCTGATTCTGGGTATAACCAACCCTGAGGGTGAGAAGAAGTACCTGGC
  961 GGCCGCATTTCCCAGCGCCTGCGGGAAGACCAACCTGGCCATGATGAACCCCAGCCTCCCCGGGTGGAAGGTTGAGTGCG
1041 TCGGGGATGACATTGCCTGGATGAAGTTTGACGCACAAGGTCATTTAAGGGCCATCAACCCAGAAAATGGCTTTTTCGGT
1121 GTCGCTCCTGGGACTTCAGTGAAGACCAACCCCAATGCCATCAAGACCATCCAGAAGAACACAATCTTTACCAATGTGGC
1201 CGAGACCAGCGACGGGGGCGTTTACTGGGAAGGTATTGATGAGCCGCTAGCTTCAGGCGTCACCATCACGTCCTGGAAGA
1281 ATAAGGAGTGGAGCTCAGAGGATGGGGAACCTTGTGCCCACCCCAACTCGAGGTTCTGCACCCCTGCCAGCCAGTGCCCC
1361 ATCATTGATGCTGCCTGGGAGTCTCCGGAAGGTGTTCCCATTGAAGGCATTATCTTTGGAGGCCGTAGACCTGCTGGTGT
1441 CCCTCTAGTCTATGAAGCTCTCAGCTGGCAACATGGAGTCTTTGTGGGGGCGGCCATGAGATCAGAGGCCACAGCGGCTG
1521 CAGAACATAAAGGCAAAATCATCATGCATGACCCCTTTGCCATGCGGCCCTTCTTTGGCTACAACTTCGGCAAATACCTG
1601 GCCCACTGGCTTAGCATGGCCCAGCACCCAGCAGCCAAACTGCCCAAGATCTTCCATGTCAACTGGTTCCGGAAGGACAA
1681 GGAAGGCAAATTCCTCTGGCCAGGCTTTGGAGAGAACTCCAGGGTGCTGGAGTGGATGTTCAACCGGATCGATGGAAAAG
1761 CCAGCACCAAGCTCACGCCCATAGGCTACATCCCCAAGGAGGATGCCCTGAACCTGAAAGGCCTGGGGCACATCAACATG
1841 ATGGAGCTTTTCAGCATCTCCAAGGAATTCTGGGAGAAGGAGGTGGAAGACATCGAGAAGTATCTGGAGGATCAAGTCAA
1921 TGCCGACCTCCCCTGTGAAATCGAGAGAGAGATCCTTGCCTTGAAGCAAAGAATAAGCCAGATGTAATCAGGGCCTGAGT
2001 GCTTTACCTTTAAAATCATTCCCTTTCCCATCCATAAGGTGCAGTAGGAGCAAGAGAGGGCAAGTGTTCC
Table A13E2. Protein sequence of variant (underlined) NOV1a5p. (SEQ ID NO:88)
      1 MPPQLQNGLNLSAKVVQGSLDSLPQAVREFLENNAELCQPDHIHICDGSEEENGRLLGQMEEEGILRRLKKYDNCWLALT
    81 DPRDVARIESKTVIVTQEQRDTVPIPKTGLSQLGRWMSEEDFEKAFNARFPGCMKGRTMYVIPFSMGPLGSPLSKIGIEL
  161 TDSPYVVASMRIMTRNGTPVLEALGDGEFVKCLHSVGCPLPLQKPLVNNWPCNPELTLIAHLPDRREIISFGSGYGGNSL
  241 LGKKCFALRIASRLAKEEGWLAEHMLILGITNPEGEKKYLAAAFPSACGKTNLANMNPSLPGWKVECVGDDIAWNKFDAQ
  321 GHLRAINPENGFFGVAPGTSVKTNPNAIKTIQKNTIFTNVAETSDGGVYWEGIDEPLASGVTITSWKNKEWSSEDGEPCA
  401 HPNSRFCTPASQCPIIDAAWESPEGVPIEGIIFGGRRPAGVPLVYEALSWQHGVFVGAAMRSEATAAAEHKGKIIMHDPF
  481 ANRPFFGYNFGKYLAHWLSMAQHPAAKLPKIFHVNWFRKDKEGKFLWPGFGENSRVLEWNFNRIDGKASTKLTPIGYIPK
  561 EDALNLKGLGHINMMELFSISKEFWEKEVEDIEKYLEDOVNADLPCEIEREILALKQRISQM
Table A13E3. Alteration effect
Met to Ile
Table A13F1.
Nucleotide sequence of variant 13380271 NOV1a6n (underlined). A/G (SEQ ID NO:89)
      1 GAACACAAACTTGCTGGCGGGAAGAGCCCGGAAAGAAACCTGTGGATCTCCCTTCGAGATCATCCAAAGAGAAGAAAGGT
    81 GACCTCACATTCGTGCCCCTTAGCAGCACTCTGCAGAAATGCCTCCTCAGCTGCAAAACGGCCTGAACCTCTCGGCCAAA
  161 GTTGTCCAGGGAAGCCTGGACAGCCTGCCCCAGGCAGTGAGGGAGTTTCTCGAGAATAACGCTGAGCTGTGTCAGCCTGA
  241 TCACATCCACATCTGTGACGGCTCTGAGGAGGAGAATGGGCGGCTTCTGGGCCAGATGGAGGAAGAGGGCATCCTCAGGC
  321 GGCTGAAGAAGTATGACAACTGCTGGTTGGCTCTCACTGACCCCAGGGATGTGGCCAGGATCGAAAGCAAGACGGTTATC
  401 GTCACCCAAGAGCAAAGAGACACAGTGCCCATCCCCAAAACAGGCCTCAGCCAGCTCGGTCGCTGGATGTCAGAGGAGGA
  481 TTTTGAGAAAGCGTTCAATGCCAGGTTCCCAGGGTGCATGAAAGGTCGCACCATGTACGTCATCCCATTCAGCATGGGGC
  561 CGCTGGGCTCACCTCTGTCGAAGATCGGCATCGAGCTGACGGATTCGCCCTACGTGGTGGCCAGCATGCGGATCATGACG
  641 CGGATGGGCACGCCCGTCCTGGAAGCACTGGCCGATGGGGAGTTTGTCAAATGCCTCCATTCTGTGGGGTGCCCTCTGCC
  721 TTTACAAAAGCCTTTGGTCAACAACTGGCCCTGCAACCCGGAGCTGACGCTCATCGCCCACCTGCCTGACCGCAGAGAGA
  801 TCATCTCCTTTGGCAGTGGGTACGGCGGGAACTCGCTGCTCGGGAAGAAGTGCTTTGCTCTCAGGATGGCCAGCCGGCTG
  881 GCCAAGGAGGAAGGGTGGCTGGCAGAGCACATGCTGGTTCTGGGTATAACCAACCCTGAGGGTGAGAAGAAGTACCTGGC
  961 GGCCGCATTTCCCAGCGCCTGCGGGAAGACCAACCTGGCCATGATGAACCCCAGCCTCCCCGGGTGGAAGGTTGAGTGCG
1041 TCGGGGATGACATTGCCTGGATGAAGTTTGACGCACAAGGTCATTTAAGGGCCATCAACCCAGAAAATGGCTTTTTCGGT
1121 GTCGCTCCTGGGACTTCAGTGAAGACCAACCCCAATGCCATCAAGACCATCCAGAAGAACACAATCTTTACCAATGTGGC
1201 CGAGACCAGCGACGGGGGCGTTTACTGGGAAGGTATTGATGAGCCGCTAGCTTCAGGCGTCACCATCACGTCCTGGAAGA
1281 ATAAGGAGTGGAGCTCAGAGGATGGGGAACCTTGTGCCCACCCCAACTCGAGGTTCTGCACCCCTGCCAGCCAGTGCCCC
1361 ATCATTGATGCTGCCTGGGAGTCTCCGGAAGGTGTTCCCATTGAAGGCATTATCTTTGGAGGCCGTAQACCTGCTGGTGT
1441 CCCTCTAGTCTATGAAGCTCTCAGCTGGCAACATGGAGTCTTTGTGGGGGCGGCCATGAGATCAGAGGCCACAGCGGCTG
1521 CAGAACATAAAGGCAAAATCATCATGCATGACCCCTTTGCCATGCGGCCCTTCTTTGGCTACAACTTCGGCAAATACCTG
1601 GCCCACTGGCTTAGCATGGCCCAGCACCCAGCAGCCAAACTGCCCAAGATCTTCCATGTCAACTGGTTCCGGAAGGACAA
1681 GGAAGGCAAATTCCTCTGGCCAGGCTTTGGAGAGAACTCCAGGGTGCTGGAGTGGATGTTCAACCGGATCGATGGAAAAG
1761 CCAGCACCAAGCTCACGCCCATAGGCTACATCCCCAAGGAGGATGCCCTGAACcTGAAAGGCCTGGGGCACATCAACATG
1841 ATGGAGCTTTTCAGCATCTCCAAGGAATTCTGGGAGAAGGAGGTGGAAGACATCGAGAAGTATCTGGAGGATCAAGTCAA
1921 TGCCGACCTCCCCTGTGAAATCGAGAGAGAGATCCTTGCCTTGAAGCAAAGAATAAGCCAGATGTAATCAGGGCCTGAGT
2001 GCTTTACCTTTAAAATCATTCCCTTTCCCATCCATAAGGTGCAGTAGGAGCAAGAGAGGGCAAGTGTTCC
Table A13F2. Protein sequence of variant NOV1a6p (underlined). (SEQ ID NO:90)
      1 MPPQLQNGLNLSAKVVQGSLDSLPQAVREFLENNAELCQPDHIHICDGSEEENGRLLGQMEEEGILRRLKKYDNCWLALT
    81 DPRDVARIESKTVIVTQEQRDTVPIPKTGLSQLGRWMSEEDFEKAFNARFPGCMKGRTMYVIPFSMGPLGSPLSKIGIEL
  161 TDSPYVVASMRIMTRNGTPVLEALGDGEFVKCLHSVGCPLPLQKPLVNNWPCNPELTLIAHLPDRREIISPGSGYGGNSL
  241 LGKKCFALRMASRLAKEEGWLAEHMLVLGITNPEGEKXYLAAAFPSACGKTNLAMMNPSLPGWKVECVGDDIAWMKFDAQ
  321 GHLRAINPENGFFGVAPGTSVKTNPNAIKTIQKNTIFTNVAETSDGGVYWEGIDEPLASGVTITSWKNKEWSSEDGEPCA
  401 HPNSRFCTPASQCPIIDAAWESPEGVPIEGIIFGGRRPAGVPLVYEALSWQHGVFVGAANRSEATAAAEHKGKIIMHDPF
  481 AMRPFFGYNFGKYLAHWLSMAQHPAAKLPKIFHVNWFRKDKEGKFLWPGFGENSRVLEWMFNRIDGKASTKLTPIGYIPK
  561 EDALNLKGLGHINNHELFSISKEFWEKEVEDIEKYLEDQVNADLPCEIEREILALKQRISQM
Table A13F3. Alteration effect
Ile to Val
Table A13G1.
Nucleotide sequence of variant 13378861 NOV1a7n (underlined). G/A (SEQ ID NO:91)
      1 GAACACAAACTTGCTGGCGGGAAGAGCCCGGAAAGAAACCTGTGGATCTCCCTTCGAGATCATCCAAAGAGAAGAAAGGT
    81 GACCTCACATTCGTGCCCCTTAGCAGCACTCTGCAGAAATGCCTCCTCAGCTGCAAAACGGCCTGAACCTCTCGGCCAAA
  161 GTTGTCCAGGGAAGCCTGGACAGCCTGCCCCAGGCAGTGAGGGAGTTTCTCGAGAATAACGCTGAGCTGTGTCAGCCTGA
  241 TCACATCCACATCTGTGACGGCTCTGAGGAGGAGAATGGGCGGCTTCTGGGCCAGATGGAGGAAGAGGGCATCCTCAGGC
  321 GGcTGAAGAAGTATGACAACTGCTGGTTGGCTCTCACTGACCCCAGGGATGTGGCCAGGATCGAAAGCAAGACGGTTATC
  401 GTCACCCAAGAGCAAAGAGACACAGTGCCCATCCCCAAAACAGGCCTCAGCCAGCTCGGTCGCTGGATGTCAGAGGAGGA
  481 TTTTGAGAAAGCGTTCAATGCCAGGTTCCCAGGGTGCATGAAAGGTCGCACCATGTACGTCATCCCATTCAGCATGCGGC
  561 CGCTGGGCTCACCTCTGTCGAAGATCGGCATCGAGCTGACGGATTCGCCCTACGTGGTGGCCAGCATGCGGATCATGACG
  641 CGGATGGGCACGCCCGTCCTGGAAGCACTGGGCGATGGGGAGTTTGTCAAATGCCTCCATTCTGTGGGGTGCCCTCTGCC
  721 TTTACAAAAGCCTTTGGTCAACAACTGGCCCTGCAACCCGGAGCTGACGCTCATCGCCCACCTGCCTGACCGCAGAGAGA
  801 TCATCTCCTTTGGCAGTGGGTACGGCGGGAACTCGCTGCTCGGGAAGAAGTGCTTTGCTCTCAGGATGGCCAGCCGGCTG
  881 GCCAAGGAGGAAGGGTGGCTGGCAGAGCACATGCTGATTCTGGGTATAACCAACCCTGAGGGTAAGAAGAAGTACCTGGC
  961 GGCCGCATTTCCCAGCGCCTGCGGGAAGACCAACCTGGCCATGATGAACCCCAGCCTCCCCGGGTGGAAGGTTGAGTGCG
1041 TCGGGGATGACATTGCCTGGATGAAGTTTGACGCACAAGGTCATTTAAGGGCCATCAACCCAGAAAATGGCTTTTTCGGT
1121 GTCGCTCCTGGGACTTCAGTGAAGACCAACCCCAATGCCATCAAGACCATCCAGAAGAACACAATCTTTACCAATGTGGC
1201 CGAGACCAGCGACGGGGGCGTTTACTGGGAAGGTATTGATGAGCCGCTAGCTTCAGGCGTCACCATCACGTCCTGGAAGA
1281 ATAAGGAGTGGAGCTCAGAGGATGGGGAACCTTGTGCCCACCCCAACTCGAGGTTCTGCACCCCTGCCAGCCAGTGCCCC
1361 ATCATTGATGCTGCCTGGGAGTCTCCGGAAGGTGTTCCCATTGAAGGCATTATCTTTGGAGGCCGTAGACCTGCTGGTGT
1441 CCCTCTAGTCTATGAAGCTCTCAGCTGGCAACATGGAGTCTTTGTGGGGGCGGCCATGAGATCAGAGGCCACAGCGGCTG
1521 CAGAACATAAAGGCAAAATCATCATGCATGACCCCTTTGCCATGCGGCCCTTCTTTGGCTACAACTTCGGCAAATACCTG
1601 GCCCACTGGCTTAGCATGGCCCAGCACCCAGCAGCCAAACTGCCCAAGATCTTCCATGTCAACTGGTTCCGGAAGGACAA
1681 GGAAGGCAAATTCCTCTGGCCAGGCTTTGGAGAGAACTCCAGGGTGCTGGAGTGGATGTTCAACCGGATCGATGGAAAAG
1761 CCAGCACCAAGCTCACGCCCATAGGCTACATCCCCAAGGAGGATGCCCTGAACCTGAAAGGCCTGGGGCACATCAACATG
1841 ATGGAGCTTTTCAGCATCTCCAAGGAATTCTGGGAGAAGGAGGTGGAAGACATCGAGAAGTATCTGGAGGATCAAGTCAA
1921 TGCCGACCTCCCCTGTGAAATCGAGAGAGAGATCCTTGCCTTGAAGCAAAGAATAAGCCAGATGTAATCAGGGCCTGAGT
2001 GCTTTACCTTTAAAATCATTCCCTTTCCCATCCATAAGGTGCAGTAGGAGCAAGAGAGGGCAAGTGTTCC
Table A13G2. Protein sequence of variant NOV1a7p (underlined). (SEQ ID NO:92)
      1 MPPQLQNGLNLSAKVVQGSLDSLPQAVREFLENNAELCQPDHIHICDGSEEENGRLLGQMEEEGILRRLKKYDNCWLALT
    81 DPRDVARIESKTVIVTQEQRDTVPIPKTGLSOLGRWMSEEDFEKAFNARFPGCMKGRTMYVIPFSMGPLGSPLSKIGIEL
  161 TDSPYVVASMRIMTRNGTPVLEALGDGEFVKCLHSVGCPLPLQKPLVNNWPCNPELTLIAHLPDRREIISFGSGYGGNSL
  241 LGKKCFALRMASRLAKEEGWLAEHNLILGITNPEGKKKYLAAAFPSACGKTNLANMNPSLPGWKVECVGDDIAWNKFDAQ
  321 GHLRAINPENGFFGVAPGTSVKTNPNAIKTIQKNTIFTNVAETSDGGVYWEGIDEPLASGVTITSWKNKEWSSEDGEPCA
  401 HPNSRFCTPASQCPIIDAAWESPEGVPIEGIIFGGRRPAGVPLVYEALSWQHGVFVGAANRSEATAAAEHKGKIIMHDPF
  481 AMRPFFGYNFGKYLAHWLSMAQHPAAKLPKIFHVNMFRKDKEGKFLWPGFGENSRVLEWMFNRIDGKASTKLTPIGYIPK
  561 EDALNLKGLGHINMMELFSISKEFWEKEVEDIEKYLEDQVNADLPCEIEREILALKQRISQM
Table A13G3. Alteration effect
Glu to Lys
Table A13H1.
Nucleotide sequence of variant 13379542 NOV1a8n (underlined). C/T (SEQ ID NO:93)
      1 GAACACAAACTTGCTGGCGGGAAGAGCCCGGAAAGAAACCTGTGGATCTCCCTTCGAGATCATCCAAAGAGAAGAAAGGT
    81 GACCTCACATTCGTGCCCCTTAGCAGCACTCTGCAGAAATGCCTCCTCAGCTGCAAAACGGCCTGAACCTCTCGGCCAAA
  161 GTTGTCCAGGGAAGCCTGGACAGCCTGCCCCAGGCAGTGAGGGAGTTTCTCGAGAATAACGCTGAGCTGTGTCAGCCTGA
  241 TCACATCCACATCTGTGACGGCTCTGAGGAGGAGAATGGGCGGCTTCTGGGCCAGATGGAGGAAGAGGGCATCCTCAGGC
  321 GGCTGAAGAAGTATGACAACTGCTGGTTGGCTCTCACTGACCCCAGGGATGTGGCCAGGATCGAAAGCAAGACGGTTATC
  401 GTCACCCAAGAGCAAAGAGACACAGTGCCCATCCCCAAAACAGGCCTCAGCCAGCTCGGTCGCTGGATGTCAGAGGAGGA
  481 TTTTGAGAAAGCGTTCAATGCCAGGTTCCCAGGGTGCATGAAAGGTCGCACCATGTACGTCATCCCATTCAGCATGGGGC
  561 CGCTGGGCTCACCTCTGTCGAAGATCGGCATCGAGCTGACGGATTCGCCCTACGTGGTGGCCAGCATGCGGATCATGACG
  641 CCGATGGGCACGCCCGTCCTGGAAGCACTGGGCGATGGGGAGTTTGTCAAATGCCTCCATTCTGTGGGGTGCCCTCTGCC
  721 TTTACAAAAGCCTTTGGTCAACAACTGGCCCTGCAACCCGGAGCTGACGCTCATCGCCCACCTGCCTGACCGCAGAGAGA
  801 TCATCTCCTTTGGCAGTGGGTACGGCGGGAACTCGCTGCTCGGGAAGAAGTGCTTTGCTCTCAGGATGGCCAGCCGGCTG
  881 GCCAAGGAGGAAGGGTGGCTGGCAGAGCACATGCTGATTCTGGGTATAACCAACCCTGAGGGTGAGAAGAAGTACCTGGC
  961 GGCCGCATTTCCCAGCGCCTGCGGGAAGACCAACCTGGCCATGATGAACCCCAGCCTCCCCGGGTGGAAGGTTGAGTGCG
1041 TCGGGGATGACATTGCCTGGATGAAGTTTGACGCACAAGGTCATTTAAGGGCCATCAACCCAGAAAATGGCTTTTTCGGT
1121 GTCGCTCCTGGGACTTCAGTGAAGACCAACCCCAATGCCATCAAGACCATCCAGAAGAACACAATCTTTACCAATGTGGC
1201 CGAGACCAGCGACGGGGGCGTTTACTGGGAAGGTATTGATGAGCCGCTAGCTTCAGGTGTCACCATCACGTCCTGGAAGA
1281 ATAAGGAGTGGAGCTCAGAGGATGGGGAACCTTGTGCCCACCCCAACTCGAGGTTCTGCACCCCTGCCAGCCAGTGCCCC
1361 ATCATTGATGCTGCCTGGGAGTCTCCGGAAGGTGTTCCCATTGAAGGCATTATCTTTGGAGGCCGTAGACCTGCTGGTGT
1441 CCCTCTAGTCTATGAAGCTCTCAGCTGGCAACATGGAGTCTTTGTGGGGGCGGCCATGAGATCAGAGGCCACAGCGGCTG
1521 CAGAACATAAAGGCAAAATCATCATGCATGACCCCTTTGCCATGCGGCCCTTCTTTGGCTACAACTTCGGCAAATACCTG
1601 GCCCACTGGCTTAGCATCGCCCAGCACCCAGCAGCCAAACTGCCCAAGATCTTCCATGTCAACTGGTTCCGGAAGGACAA
1681 GGAAGGCAAATTCCTCTGGCCAGGCTTTGGAGAGAACTCCAGGGTGCTGGAGTGGATGTTCAACCGGATCGATGGAAAAG
1761 CCAGCACCAAGCTCACGCCCATAGGCTACATCCCCAAGGAGGATGCCCTGAACCTGAAAGGCCTGGGGCACATCAACATG
1841 ATGGAGCTTTTCAGCATCTCCAAGGAATTCTGGGAGAAGGAGGTGGAAGACATCGAGAAGTATCTGGAGGATCAAGTCAA
1921 TGCCGACCTCCCCTGTGAAATCGAGAGAGAGATCCTTGCCTTGAAGCAAAGAATAAGCCAGATGTAATCAGGGCCTGAGT
2001 GCTTTACCTTTAAAATCATTCCCTTTCCCATCCATAAGGTGCAGTAGGAGCAAGAGAGGGCAAGTGTTCC
Table A13H2. Protein sequence of variant NOV1a8p (underlined). (SEQ ID NO:94)
      1 MPPQLQNGLNLSAKVVQGSLDSLPQAVREFLENNAELCQPDHIHICDGSEEENGRLLGQMEEEGILRRLKKYDNCWLALT
    81 DPRDVARIESKTVIVTQEQRDTVPIPKTGLSQLGRWHSEEDFEKAFNARFPGCHKGRTMYVIPFSMGPLGSPLSKIGIEL
  161 TDSPYVVASMRIMTRMGTPVLEALGDGEFVKCLHSVGCPLPLQKPLVNNWPCNPELTLIAHLPDRREIISFGSGYGGNSL
  241 LGKKCFALRMASRLAKEEGWLAEHHLILGITNPEGEKKYLAAAFPSACGKTNLANMNPSLPGWKVECVGDDIAWMKFDAQ
  321 GHLRAINPENGFFGVAPGTSVKTNPNAIKTIQKNTIFTNVAETSDGGVYWEGIDEPLASGVTITSWKNKEWSSEDGEPCA
  401 HPNSRFCTPASQCPIIDAAWESPEGVPIEGIIFGGRRPAGVPLVYEALSWQHGVFVGAANRSEATAAAEHKGKIIMHDPF
  481 ANRPFFGYNFGKYLAHWLSMAQHPAAKLPKIFHVNWFRKDKEGKFLWPGFGENSRVLEWHFNRIDGKASTKLTPIGYIPK
  561 EDALHLKGLGHINMMELFSISKEFWEKEVEDIEKYLEDQVNADLPCEIEREILALKQRISQM
Table A13H3. Alteration effect
No change.
Table A1311.
Nucleotide sequence of variant 13378352 NOV1a9n (underlined). C/A (SEQ ID NO:95)
      1 GAACACAAACTTGCTGGCGGGAAGAGCCCGGAAAGAAACCTGTGGATCTCCCTTCGAGATCATCCAAAGAGAAGAAAGGT
    81 GACCTCACATTCGTGCCCCTTAGCAGCACTCTGCAGAAATGCCTCCTCAGCTGCAAAACGGCCTGAACCTCTCGGCCAAA
  161 GTTGTCCAGGGAAGCCTGGACAGCCTGCCCCAGGCAGTGAGGGAGTTTCTCGAGAATAACGCTGAGCTGTGTCAGCCTGA
  241 TCACATCCACATCTGTGACGGCTCTGAGGAGGAGAATGGGCGGCTTCTGGGCCAGATGGAGGAAGAGGGCATCCTCAGGC
  321 GGCTGAAGAAGTATGACAACTGCTGGTTGGCTCTCACTGACCCCAGGGATGTGGCCAGGATCGAAAGCAAGACGGTTATC
  401 GTCACCCAAGAGCAAAGAGACACAGTGCCCATCCCCAAAACAGGCCTCAGCCAGCTCGGTCGCTGGATGTCAGAGGAGGA
  481 TTTTGAGAAAGCGTTCAATGCCAGGTTCCCAGGGTGCATGAAAGGTCGCACCATGTACGTCATCCCATTCAGCATGGGGC
  561 CGCTGGGCTCACCTCTGTCGAAGATCGGCATCGAGCTGACGGATTCGCCCTACGTGGTGGCCAGCATGCGGATCATGACG
  641 CGGATGGGCACGCCCGTCCTGGAAGCACTGGGCGATGGGGAGTTTGTCAAATGCCTCCATTCTGTGGGGTGCCCTCTGCC
  721 TTTACAAAAGCCTTTGGTCAACAACTGGCCCTGCAACCCGGAGCTGACGCTCATCGCCCACCTGCCTGACCGCAGAGAGA
  801 TCATCTCCTTTGGCAGTGGGTACGGCGGGAACTCGCTGCTCGGGAAGAAGTGCTTTGCTCTCAGGATGGCCAGCCGGCTG
  881 GCCAAGGAGGAAGGGTGGCTGGCAGAGCACATGCTGATTCTGGGTATAACCAACCCTGAGGGTGAGAAGAAGTACCTGGC
  961 GGCCGCATTTCCCAGCGCCTGCGGGAAGACCAACCTGGCCATGATGAACCCCAGCCTCCCCGGGTGGAAGGTTGAGTGCG
1041 TCGGGGATGACATTGCCTGGATGAAGTTTGACGCACAAGGTCATTTAAGGGCCATCAACCCAGAAAATGGCTTTTTCGGT
1121 GTCGCTCCTGGGACTTCAGTGAAGACCAACCCCAATGCCATCAAGACCATCCAGAAGAACACAATCTTTACCAATGTGGC
1201 CGAGACCAGCGACGGGGGCGTTTACTGGGAAGGTATTGATGAGCCGCTAGCTTCAGGCGTCACCATCACGTCCTGGAAGA
1281 ATAAGGAGTGGAGCTCAGAGGATGGGGAACCTTGTGCCCACCCCAACTCGAGGTTCTGAACCCCTGCCAGCCAGTGCCCC
1361 ATCATTGATGCTGCCTGGGAGTCTCCGGAAGGTGTTCCCATTGAAGGCATTATCTTTGGAGGCCGTAGACCTGCTGGTGT
1441 CCCTCTAGTCTATGAAGCTCTCAGCTGGCAACATGGAGTCTTTGTGGGGGCGGCCATGAGATCAGAGGCCACAGCGGCTG
1521 CAGAACATAAAGGCAAAATCATCATGCATGACCCCTTTGCCATGCGGCCCTTCTTTGGCTACAACTTCGGCAAATACCTG
1601 GCCCACTGGCTTAGCATGGCCCAGCACCCAGCAGCCAAACTGCCCAAGATCTTCCATGTCAACTGGTTCCGGAAGGACAA
1681 GGAAGGCAAATTCCTCTGGCCAGGCTTTGGAGAGAACTCCAGGGTGCTGGAGTGGATGTTCAACCGGATCGATGGAAAAG
1761 CCAGCACCAAGCTCACGCCCATAGGCTACATCCCCAAGGAGGATGCCCTGAACCTGAAAGGCCTGGGGCACATCAACATG
1841 ATGGAGCTTTTCAGCATCTCCAAGGAATTCTGGGAGAAGGAGGTGGAAGACATCGAGAAGTATCTGGAGGATCAAGTCAA
1921 TGCCGACCTCCCCTGTGAAATCGAGAGAGAGATCCTTGCCTTGAAGCAAAGAATAAGCCAGATGTAATCAGGGCCTGAGT
2001 GCTTTACCTTTAAAATCATTCCCTTTCCCATCCATAAGGTGCAGTAGGAGCAAGAGAGGGCAAGTGTTCC
Table A 1312. Protein sequence of variant NOV1a9p (underlined). (SEQ ID NO:96)
      1 MPPQLQNGLNLSAKVVQGSLDSLPQAVREFLENNAELCQPDHIHICDGSEEENGRLLGOMEEEGILRRLKKYDNCWLALT
    81 DPRDVARIESKTVIVTQEQRDTVPIPKTGLSQLGRWMSEEDFEKAFNARFPGCHKGRTMYVIPFSMGPLGSPLSKIGIEL
  161 TDSPYVVASMRIMTRNGTPVLEALGDGEFVKCLHSVGCPLPLQKPLVNNNPONPELTLIAHLPDRREIISFGSGYGGNSL
  241 LGKKCFALRMASRLAKEEGWLAEHMLILGITNPEGEKKYLAAAFPSACGKTNLANMNPSLPGWKVECVGDDIAWMKFDAQ
  321 GHLRAINPENGFFGVAPGTSVKTNPNAIKTIQKNTIFTNVAETSDGGVYWEGIDEPLASGVTITSWKNKEWSSEDGEPCA
  401 HPNSRF*TPASQCPIIDAAWESPEGVPIEGIIFGGRRPAGVPLVYEALSWQHGVFVGAANRSEATAAAEHKGKIIMHDPF
  481 ANRPFFGYNFGKYLAHWLSMAQHPAAKLPKIFHVNWFRKDKEGKFLWPGFGEHSRVLEWHFNRIDGKASTKLTPIGYIPK
  561 EDALNLKGLGHINMMELFSISKEFWEKEVEDIEKYLEDQVNADLPCEIEREILALKQRISQM
Table A 1313. Alteration effect
Cys to STOP
Table A13J1.
Nucleotide sequence of variant 13375322 NOV1a10n (underlined). A/G (SEQ ID NO:97)
      1 GAACACAAACTTGCTGGCGGGAAGAGCCCGGAAAGAAACCTGTGGATCTCCCTTCGAGATCATCCAAAGAGAAGAAAGGT
    81 GACCTCACATTCGTGCCCCTTAGCAGCACTCTGCAGAAATGCCTCCTCAGCTGCAAAACGGCCTGAACCTCTCGGCCAAA
  161 GTTGTCCAGGGAAGCCTGGACAGCCTGCCCCAGGCAGTGAGGGAGTTTCTCGAGAATAACGCTGAGCTGTGTCAGCCTGA
  241 TCACATCCACATCTGTGACGGCTCTGAGGAGGAGAATGGGCGGCTTCTGGGCCAGATGGAGGAAGAGGGCATCCTCAGGC
  321 GGCTGAAGAAGTATGACAACTGCTGGTTGGCTCTCACTGACCCCAGGGATGTGGCCAGGATCGAAAGCAAGACGGTTATC
  401 GTCACCCAAGAGCAAAGAGACACAGTGCCCATCCCCAAAACAGGCCTCAGCCAGCTCGGTCGCTGGATGTCAGAGGAGGA
  481 TTTTGAGAAAGCGTTCAATGCCAGGTTCCCAGGGTGCATGAAAGGTCGCACCATGTACGTCATCCCATTCAGCATGGGGC
  561 CGCTGGGCTCACCTCTGTCGAAGATCGGCATCGAGCTGACGGATTCGCCCTACGTGGTGGCCAGCATCCGGATCATGACG
  641 CGGATGGGCACGCCCGTCCTGGAAGCACTGGGCGATGGGGAGTTTGTCAAATGCCTCCATTCTGTGGGGTGCCCTCTGCC
  721 TTTACAAAAGCCTTTGGTCAACAACTGGCCCTGCAACCCGGAGCTGACGCTCATCGCCCACCTGCCTGACCGCAGAGAGA
  801 TCATCTCCTTTGGCAGTGGGTACGGCGGGAACTCGCTGCTCGGGAAGAAGTGCTTTGCTCTCAGGATGGCCAGCCGGCTG
  881 GCCAAGGAGGAAGGGTGGCTGGCAGAGCACATGCTGATTCTGGGTATAACCAACCCTGAGGGTGAGAAGAAGTACCTGGC
  961 GGCCGCATTTCCCAGCGCCTGCGGGAAGACCAACCTGGCCATGATGAACCCCAGCCTCCCCGGGTGGAAGGTTGAGTGCG
1041 TCGGGGATGACATTGCCTGGATGAAGTTTGACGCACAAGGTCATTTAAGGGCCATCAACCCAGAAAATGGCTTTTTCGGT
1121 GTCGCTCCTGGGACTTCAGTGAAGACCAACCCCAATGCCATCAAGACCATCCAGAAGAACACAATCTTTACCAATGTGGC
1201 CGAGACCAGCGACGGGGGCGTTTACTGGGAAGGTATTGATGAGCCGCTAGCTTCAGGCGTCACCATCACGTCCTGGAAGA
1281 ATAAGGAGTGGAGCTCAGAGGATGGGGAACCTTGTGCCCACCCCAACTCGAGGTTCTGCACCCCTGCCAGCCAGTGCCCC
1361 ATCATTGATGCTGCCTGGGAGTCTCCGGAAGGTGTTCCCATTGAAGGCATTATCTTTGGAGGCCGTAGACCTGCTGGTGT
1441 CCCTCTAGTCTATGAAGCTCTCAGCTGGCAACATGGAGTCTTTGTGGGGGCGGCCATGAGATCAGAGGCCACAGCGGCTG
1521 CAGAACATAAAGGCAAAATCATCATGCATGACCCCTTTGCCATGCGGCCCTTCTTTGGCTACAACTTCGGCAAATACCTG
1601 GCCCACTGGCTTAGCATGGCCCAGCACCCAGCAGCCAAACTGCCCAAGATCTTCCATGTCAACTGGTTCCGGAAGGACAG
1681 GGAAGGCAAATTCCTCTGGCCAGGCTTTGGAGAGAACTCCAGGGTGCTGGAGTGGATGTTCAACCGGATCGATGGAAAAG
1761 CCAGCACCAAGCTCACGCCCATAGGCTACATCCCCAAGGAGGATGCCCTGAACCTGAAAGGCCTGGGCCACATCAACATG
1841 ATGGAGCTTTTCAGCATCTCCAAGGAATTCTGGGAGAAGGAGGTGGAAGACATCGAGAAGTATCTGGAGGATCAAGTCAA
1921 TGCCGACCTCCCCTGTGAAATCGAGAGAGAGATCCTTGCCTTGAAGCAAAGAATAAGCCAGATGTAATCAGGGCCTGAGT
2001 GCTTTACCTTTAAAATCATTCCCTTTCCCATCCATAAGGTGCAGTAGGAGCAAGAGAGGGCAAGTGTTCC
Table A13J2. Protein sequence of variant NOV1a10p (underlined). (SEQ ID NO:98)
      1 MPPQLQNGLNLSAKVVQGSLDSLPQAVREFLENNAELCQPDHIHICDGSEEENGRLLGQMEEEGILRRLKKYDNCWLALT
    81 DPRDVARIESKTVIVTQEQRDTVPIPKTGLSQLGRWMSEEDFEKAFNARFPGCMKGRTNYVIPFSMGPLGSPLSKIGIEL
  161 TDSPYVVASHRIMThNGTPVLEALGDGEFVKCLHSVGCPLPLQKPLVNNWPCNPELTLIAHLPDRREIISFGSGYGGNSL
  241 LGKKCFALRMASRLAKEEGWLAEHMLILGITNPEGEKKYLAAAFPSACGKTNLANMNPSLPGWKVECVGDDIAWMKFDAQ
  321 GHLRAINPENGFFGVAPGTSVKTNPNAIKTIQKNTIFTNVAETSDGGVYWEGIDEPLASGVTITSWKNKEWSSEDGEPCA
  401 HPNSRFCTPASQCPIIDAAWESPEGVPIEGIIFGGRRPAGVPLVYEALSWQHGVFVGAAMRSEATAAAEHKGKIIMHDPF
  481 ANRPFFCYNFGKYLAHWLSMAQHPAAKLPKIFHVHWFRKDREGKFLWPGFGENSRVLEWMFNRIDGKASTKLTPIGYIPK
  561 EDALNLKGLGHINNMELFSISKEFWEKEVEDIEKYLEDQVNADLPCEIEREILALKORISQM
Table A13J3. Alteration effect
Lys to Arg
Table A13K1.
Nucleotide sequence of variant 13375321 NOV1a11n (underlined). A/G (SEQ ID NO:99)
      1 GAACACAAACTTGCTGGCGGGAAGAGCCCGGAAAGAAACCTGTGGATCTCCCTTCGAGATCATCCAAAGAGAAGAAAGGT
    81 GACCTCACATTCGTGCCCCTTAGCAGCACTCTGCAGAAATGCCTCCTCAGCTGCAAAACGGCCTGAACCTCTCGGCCAAA
  161 GTTGTCCAGGGAAGCCTGGACAGCCTGCCCCAGGCAGTGAGGGAGTTTCTCGAGAATAACGCTGAGCTGTGTCAGCCTGA
  241 TCACATCCACATCTGTGACGGCTCTGAGGAGGAGAATGGGCGGCTTCTGGGCCAGATGGAGGAAGAGGGCATCCTCAGGC
  321 GGCTGAAGAAGTATGACAACTGCTGGTTGGCTCTCACTGACCCCAGGGATGTGGCCAGGATCGAAAGCAAGACGGTTATC
  401 GTCACCCAAGAGCAAAGAGACACAGTGCCCATCCCCAAAACAGGCCTCAGCCAGCTCGGTCGCTGGATGTCAGAGGAGGA
  481 TTTTGAGAAAGCGTTCAATGCCAGGTTCCCAGGGTGCATGAAAGGTCGCACCATGTACGTCATCCCATTCAGCATGGGGC
  561 CGCTGGGCTCACCTCTGTCGAAGATCGGCATCGAGCTGACGGATTCGCCCTACGTGGTGGCCAGCATGCGGATCATGACG
  641 CGGATGGGCACGCCCGTCCTGGAAGCACTGGGCGATGGGGAGTTTGTCAAATGCCTCCATTCTGTGGGGTGCCCTCTGCC
  721 TTTACAAAAGCCTTTGGTCAACAACTGGCCCTGCAACCCGGAGCTGACGCTCATCGCCCACCTGCCTGACCGCAGAGAGA
  801 TCATCTCCTTTGGCAGTGGGTACGGCGGGAACTCGCTGCTCGGGAAGAAGTGCTTTGCTCTCAGGATGGCCAGCCGGCTG
  881 GCCAAGGAGGAAGGGTGGCTGGCAGAGCACATGCTGATTCTGGGTATAACCAACCCTGAGGGTGAGAAGAAGTACCTGGC
  961 GGCCGCATTTCCCAGCGCCTGCGGGAAGACCAACCTGGCCATGATGAACCCCAGCCTCCCCGGGTGGAAGGTTGAGTGCG
1041 TCGGGGATGACATTGCCTGGATGAAGTTTGACGCACAAGGTCATTTAAGGGCCATCAACCCAGAAAATGGCTTTTTCGGT
1121 GTCGCTCCTGGGACTTCAGTGAAGACCAACCCCAATGCCATCAAGACCATCCAGAAGAACACAATCTTTACCAATGTGGC
1201 CGAGACCAGCGACGGGGGCGTTTACTGGGAAGGTATTGATGAGCCGCTAGCTTCAGGCGTCACCATCACGTCCTGGAAGA
1281 ATAAGGAGTGGAGCTCAGAGGATGGGGAACCTTGTGCCCACCCCAACTCGAGGTTCTGCACCCCTGCCAGCCAGTGCCCC
1361 ATCATTGATGCTGCCTGGGAGTCTCCGGAAGGTGTTCCCATTGAAGGCATTATCTTTGGAGGCCGTAGACCTGCTGGTGT
1441 CCCTCTAGTCTATGAAGCTCTCAGCTGGCAACATGGAGTCTTTGTGGGGGCGGCCATGAGATCAGAGGCCACAGCGGCTG
1521 CAGAACATAAAGGCAAAATCATCATGCATGACCCCTTTGCCATGCGGCCCTTCTTTGGCTACAACTTCGGCAAATACCTG
1601 GCCCACTGGCTTAGCATGGCCCAGCACCCAGCAGCCAAACTGCCCAAGATCTTCCATGTCAACTGGTTCCGGAAGGACAA
1681 GGAAGGCAAATTCCTCTGGCCAGGCTTTGGAGAGAACTCCAGGGTGCTGGGGTGGATGTTCAACCGGATCGATGGAAAAG
1761 CCAGCACCAAGCTCACGCCCATAGGCTACATCCCCAAGGAGGATGCCCTGAACCTGAAAGGCCTGGGGCACATCAACATG
1841 ATGGAGCTTTTCAGCATCTCCAAGGAATTCTGGGAGAAGGAGGTGGAAGACATCGAGAAGTATCTGGAGGATCAAGTCAA
1921 TGCCGACCTCCCCTGTGAAATCGAGAGAGAGATCCTTGCCTTGAAGCAAAGAATAAGCCAGATGTAATCAGGGCCTGAGT
2001 GCTTTACCTTTAAAATCATTCCCTTTCCCATCCATAAGGTGCAGTAGGAGCAAGAGAGGGCAAGTGTTCC
Table A13K2. Protein sequence of variant NOV1a11p (underlined). (SEQ ID NO:100)
      1 HPPQLQNGLNLSAKVVQGSLDSLPQAVREFLENNAELCQPDHIHICDGSEEEHGRLLGQMEEEGILRRLKKYDNCWLALT
    81 DPRDVARIESKTVIVTQEQRDTVPIPKTGLSQLGRWMSEEDFEKAFHARFPGCMKGRTHYVIPFSMGPLGSPLSKIGIEL
  161 TDSPYVVASMRIMTRNGTPVLEALGDGEFVKCLHSVGCPLPLQKPLVNNWPCNPELTLIAHLPDRREIISFGSGYGGNSL
  241 LGKKCFALRMASRLAKEEGWLAEHMLILGITNPEGEKKYLAAAFPSACGKTNLANMNPSLPGWKVECVGDDIAWNKFDAQ
  321 GHLRAINPENGFFGVAPGTSVKTNPNAIKTIQKNTIFTNVAETSDGGVYWEGIDEPLASGVTITSWKNKEWSSEDGEPCA
  401 HPNSRFCTPASQCPIIDAAWESPEGVPIEGIIFGGRRPAGVPLVYEALSWQHGVFVGAANRSEATAAAEHKGKIIMHDPF
  481 ANRPFFGYNFGKYLAHWLSMAQHPAAKLPKIFHVNWFRKDKEGKFLWPGFGEMSRVLGWMFNRIDGKASTKLTPIGYIPK
  561 EDALNLKGLGHINMMELFSISKEFWEKEVEDIEKYLEDQVNADLPCEIEREILALKQRISQM
Table A13K3. Alteration effect
Glu to Gly
Table A13L1.
Nucleotide sequence of variant 13375320 NOV1a12n (underlined). T/C (SEQ ID NO:101)
      1 GAACACAAACTTGCTGGCGGGAAGAGCCCGGAAAGAAACCTGTGGATCTCCCTTCGAGATCATCCAAAGAGAAGAAAGGT
    81 GACCTCACATTCGTGCCCCTTAGCAGCACTCTGCAGAAATGCCTCCTCAGCTGCAAAACGGCCTGAACCTCTCGGCCAAA
  161 GTTGTCCAGGGAAGCCTGGACAGCCTGCCCCAGGCAGTGAGGGAGTTTCTCGAGAATAACGCTGAGCTGTGTCAGCCTGA
  241 TCACATCCACATCTGTGACGGCTCTGAGGAGGAGAATGGGCGGCTTCTGGGCCAGATGGAGGAAGAGGGCATCCTCAGGC
  321 GGCTGAAGAAGTATGACAACTGCTGGTTGGCTCTCACTGACCCCAGGGATGTGGCCAGGATCGAAAGCAAGACGGTTATC
  401 GTCACCCAAGAGCAAAGAGACACAGTGCCCATCCCCAAAACAGGCCTCAGCCAGCTCGGTCGCTGGATGTCAGAGGAGGA
  481 TTTTGAGAAAGCGTTCAATGCCAGGTTCCCAGGGTGCATGAAAGGTCGCACCATGTACGTCATCCCATTCAGCATGGGGC
  561 CGCTGGGCTCACCTCTGTCGAAGATCGGCATCGAGCTGACGGATTCGCCCTACGTGGTGGCCAGCATGCGGATCATGACG
  641 CGGATGGGCACGCCCGTCCTGGAAGCACTGGGCGATGGGGAGTTTGTCAAATGCCTCCATTCTGTGGGGTGCCCTCTGCC
  721 TTTACAAAAGCCTTTGGTCAACAACTGGCCCTGCAACCCGGAGCTGACGCTCATCGCCCACCTGCCTGACCGCAGAGAGA
  801 TCATCTCCTTTGGCAGTGGGTACGGCGGGAACTCGCTGCTCGGGAAGAAGTGCTTTGCTCTCAGGATGGCCAGCCGGCTG
  881 GCCAAGGAGGAAGGGTGGCTGGCAGAGCACATGCTGATTCTGGGTATAACCAACCCTGAGGGTGAGAAGAAGTACCTGGC
  961 GGCCGCATTTCCCAGCGCCTGCGGGAAGACCAACCTGGCCATGATGAACCCCAGCCTCCCCGGGTGGAAGGTTGAGTGCG
1041 TCGGGGATGACATTGCCTGGATGAAGTTTGACGCACAAGGTCATTTAAGGGCCATCAACCCAGAAAATGGCTTTTTCGGT
1121 GTCGCTCCTGGGACTTCAGTGAAGACCAACCCCAATGCCATCAAGACCATCCAGAAGAACACAATCTTTACCAATGTGGC
1201 CGAGACCAGCGACGGGGGCCTTTACTGGGAAGGTATTGATGAGCCGCTAGCTTCAGGCGTCACCATCACGTCCTGGAAGA
1281 ATAAGGAGTGGAGCTCAGAGGATGGGGAACCTTGTGCCCACCCCAACTCGAGGTTCTGCACCCCTGCCAGCCAGTGCCCC
1361 ATCATTGATGCTGCCTGGGAGTCTCCGGAAGGTGTTCCCATTGAAGGCATTATCTTTGGAGGCCGTAGACCTGCTGGTGT
1441 CCCTCTAGTCTATGAAGCTCTCAGCTGGCAACATGGAGTCTTTGTGGGGGCGGCCATGAGATCAGAGGCCACAGCGGCTG
1521 CAGAACATAAAGGCAAAATCATCATGCATGACCCCTTTGCCATGCGGCCCTTCTTTGGCTACAACTTCGGCAAATACCTG
1601 GCCCACTGGCTTAGCATGGCCCAGCACCCAGCAGCCAAACTGCCCAAGATCTTCCATGTCAACTGGTTCCGGAAGGACAA
1681 GGAAGGCAAATTCCTCTGGCCAGGCTTTGGAGAGAACTCCAGGGTGCTGGAGTGGATGTTCAACCGGATCGATGGAAAAG
1761 CCAGCACCAAGCCCACGCCCATAGGCTACATCCCCAAGGAGGATGCCCTGAACCTGAAAGGCCTGGGGCACATCAACATG
1841 ATGGAGCTTTTCAGCATCTCCAAGGAATTCTGGGAGAAGGAGGTGGAAGACATCGAGAAGTATCTGGAGGATCAAGTCAA
1921 TGCCGACCTCCCCTGTGAAATCGAGAGAGAGATCCTTGCCTTGAAGCAAAGAATAAGCCAGATGTAATCAGGGCCTGAGT
2001 GCTTTACCTTTAAAATCATTCCCTTTCCCATCCATAAGGTGCAGTAGGACCAAGAGAGGGCAAGTGTTCC
Table A13L2. Protein sequence of variant NOV1a12p (underlined). (SEQ ID NO:102)
      1 MPPQLQWGLNISAKVVQGSLDSLPQAVREFLENNAELCQPDHIHICDGSEEENGRLLGQMEEEGILRRLKKYDNCWLALT
    81 DPRDVARIESKTVIVTQEQRDTVPIPKTGLSQLGRWMSEEDFEKAFNARFPGCMKGRTMYVIPFSMGPLGSPLSKIGIEL
  161 TDSPYVVASMRIMTRNGTPVLEALGDGEFVKCLHSVGCPLPLQKPLVNNWPCNPELTLIAHLPDRREIISFGSGYGGNSL
  241 LGKKCFALRMASRLAKEEGWLAEHMLILGITNPEGEKKYLAAAFPSACGKTNLANMNPSLPGWKVECVGDDIAWMKFDAQ
  321 GHLRAINPENGFFGVAPGTSVKTNPNAIKTIQKNTIFTNVAETSDGGVYWEGIDEPLASGVTITSWKNKEWSSEDGEPCA
  401 HPNSRFCTPASQCPIIDAAWESPEGVPIEGIIFGGRRPAGVPLVYEALSWQHGVFVGAANRSEATAAAEHKGKIIHHDPF
  481 AMRPFFGYNFGKYLAHWLSMAOHPAAKLPKIFHVNWFRKDKEGKFLWPGFGENSRVLEWMFNRIDGKASTKPTPIGYIPK
  561 EDALNLKGLGHINMMELFSISKEFWEKEVEDIEKYLEDQVNADLPCEIEREILALKQRISQM
Table A13L3. Alteration effect
Leu to Pro
Table A13M1.
Nucleotide sequence of variant 13375319 NOV1a13n (underlined). T/C (SEQ ID NO:103)
      1 GAACACAAACTTGCTGGCGGGAAGAGCCCGGAAAGAAACCTGTGGATCTCCCTTCGAGATCATCCAAAGAGAAGAAAGGT
    81 GACCTCACATTCGTGCCCCTTAGCAGCACTCTGCAGAAATGCCTCCTCAGCTGCAAAACGGCCTGAACCTCTCGGCCAAA
  161 GTTGTCCAGGGAAGCCTGGACAGCCTGCCCCAGGCAGTGAGGGAGTTTCTCGAGAATAACGCTGAGCTGTGTCAGCCTGA
  241 TCACATCCACATCTGTGACGGCTCTGAGGAGGAGAATGGGCGGCTTCTGGGCCAGATGGAGGAAGAGGGCATCCTCAGGC
  321 GGCTGAAGAAGTATGACAACTGCTGGTTGGCTCTCACTGACCCCAGGGATGTGGCCAGGATCGAAAGCAAGACGGTTATC
  401 GTCACCCAAGAGCAAAGAGACACAGTGCCCATCCCCAAAACAGGCCTCAGCCAGCTCGGTCGCTGGATGTCAGAGGAGGA
  481 TTTTGAGAAAGCGTTCAATGCCAGGTTCCCAGGGTGCATGAAAGGTCGCACCATGTACGTCATCCCATTCAGCATGGGGC
  561 CGCTGGGCTCACCTCTGTCGAAGATCGGCATCGAGCTGACGGATTCGCCCTACGTGGTGGCCAGCATGCGGATCATGACG
  641 CGGATGGGCACGCCCGTCCTGGAAGCACTGGGCGATGGGGAGTTTGTCAAATGCCTCCATTCTGTGGGGTGCCCTCTGCC
  721 TTTACAAAAGCCTTTGGTCAACAACTGGCCCTGCAACCCGGAGCTGACGCTCATCGCCCACCTGCCTGACCGCAGAGAGA
  801 TCATCTCCTTTGGCAGTGGGTACGGCGGGAACTCGCTGCTCGGGAAGAAGTGCTTTGCTCTCAGGATGGCCAGCCGGCTG
  881 GCCAAGGAGGAAGGGTGGCTGGCAGAGCACATGCTGATTCTGGGTATAACCAACCCTGAGGGTGAGAAGAAGTACCTGGC
  961 GGCCGCATTTCCCAGCGCCTGCGGGAAGACCAACCTGGCCATGATGAACCCCAGCCTCCCCGGGTGGAAGGTTGAGTGCG
1041 TCGGGGATGACATTGCCTGGATGAAGTTTGACGCACAAGGTCATTTAAGGGCCATCAACCCAGAAAATGGCTTTTTCGGT
1121 GTCGCTCCTGGGACTTCAGTGAAGACCAACCCCAATGCCATCAAGACCATCCAGAAGAACACAATCTTTACCAATGTGGC
1201 CGAGACCAGCGACGGGGGCGTTTACTGGGAAGGTATTGATGAGCCGCTAGCTTCAGGCGTCACCATCACGTCCTGGAAGA
1281 ATAAGGAGTGGAGCTCAGAGGATGGGGAACCTTGTGCCCACCCCAACTCGAGGTTCTGCACCCCTGCCAGCCAGTGCCCC
1361 ATCATTGATGCTGCCTGGGAGTCTCCGGAAGGTGTTCCCATTGAAGGCATTATCTTTGGAGGCCGTAGACCTGCTGGTGT
1441 CCCTCTAGTCTATGAAGCTCTCAGCTGGCAACATGGAGTCTTTGTGGGGGCGGCCATGAGATCAGAGGCCACAGCGGCTG
1521 CAGAACATAAAGGCAAAATCATCATGCATGACCCCTTTGCCATGCGGCCCTTCTTTGGCTACAACTTCGGCAAATACcrG
1601 GCCCACTGGCTTAGCATGGCCCAGCACCCAGCAGCCAAACTGCCCAAGATCTTCCATGTCAACTGGTTCCGGAAGGACAA
1681 GGAAGGCAAATTCCTCTGGCCAGGCTTTGGAGAGAACTCCAGGGTGCTGGAGTGGATGTTCAACCGGATCGATGGAAAAG
1761 CCAGCACCAAGCTCACGCCCATAGGCTACATCCCCAAGGAGGATGCCCTGAACCTGAAAGGCCTGGGGCACATCAACATG
1841 ATGGAGCCTTTCAGCATCTCCAAGGAATTCTGGGAGAAGGAGGTGGAAGACATCGAGAAGTATCTGGAGGATCAAGTCAA
1921 TGCCGACCTCCCCTGTGAAATCGAGAGAGAGATCCTTGCCTTGAAGCAAAGAATAAGCCAGATGTAATCAGGGCCTGAGT
2001 GCTTTACCTTTAAAATCATTCCCTTTCCCATCCATAAGGTGCAGTAGGAGCAAGAGAGGGCAAGTGTTCC
Table A13M2. Protein sequence of variant (underlined) NOV1a13p. (SEQ ID NO:104)
      1 MPPQLQNGLNLSAKVVQGSLDSLPQAVREFLENNAELCQPDHIHICDGSEEENGRLLGQMEEEGILRRLKKYDNCWLALT
    81 DPRDVARIESKTVIVTQEQRDTVPIPKTGLSQLGRWMSEEDFEKAFNARFPGCMKGRTMYVIPFSMGPLGSPLSKIGIEL
  161 TDSPYVVASMRIMTRMGTPVLEALGDGEFVKCLHSVGCPLPLQKPLVNNWPCNPELTLIAHLPDRREIISFGSGYGGNSL
  241 LGKKCFALRNASRLAKEEGWLAEHMLILCITNPEGEKKYIAAAFPSACGKTNLAMHNPSLPGWKVECVGDDIAWMKFDAQ
  321 GHLRAINPENGFFGVAPGTSVKTNPNAIKTIQKNTIFTNVAETSDGGVYWEGIDEPLASGVTITSWKNKEWSSEDGEPCA
  401 HPNSRFCTPASQCPIIDAAWESPEGVPIEGIIFGGRRPAGVPLVYEALSWQHGVFVGAANRSEATAAAEHKGKIIMHDPF
  481 ANRPFFGYNFGKYLAHWLSMAQHPAAKLPKIFHVNWFRKDKEGKFLWPGFGENSRVLEWMPNRIDGKASTKLTPIGYIPK
  561 EDALNLKGLGHINMMEPFSISKEFWEKEVEDIEKYLEDQVNADLPCEIEREILALKQRISQM
Table A13M3. Alteration effect
Leu to Pro
Table A13N1.
Nucleotide sequence of variant 13375318 NOV1a14n (underlined). T/C (SEQ ID NO:105)
      1 GAACACAAACTTGCTGGCGGGAAGAGCCCGGAAAGAAACCTGTGGATCTCCCTTCGAGATCATCCAAAGAGAAGAAAGGT
    81 GACCTGACATTCGTGCCCCTTAGCAGCACTCTGCAGAAATGCCTCCTCAGCTGCAAAACGGCCTGAACCTCTCGGCCAAA
  161 GTTGTCCAGGGAAGCCTGGACAGCCTGCCCCAGGCAGTGAGGGAGTTTCTCGAGAATAACGCTGAGCTGTGTCAGCCTGA
  241 TCACATCCACATCTGTGACGGCTCTGAGGAGGAGAATGGGCGGCTTCTGGGCCAGATGGAGGAAGAGGGCATCCTCAGGC
  321 GGCTGAAGAAGTATGACAACTGCTGGTTGGCTCTCACTGACCCCAGGGATGTGGCCAGGATCGAAAGCAAGACGGTTATC
  401 GTCACCCAAGAGCAAAGAGACACAGTGCCCATCCCCAAAACAGGCCTCAGCCAGCTCGGTCGCTGGATGTCAGAGGAGGA
  481 TTTTGAGAAAGCGTTCAATGCCAGGTTCCCAGGGTGCATGAAAGGTCGCACCATGTACGTCATCCCATTCAGCATGGGGC
  561 CGCTGGGCTCACCTCTGTCGAAGATCGGCATCGAGCTGACGGATTCGCCCTACGTGGTGGCCAGCATGCGGATCATGACG
  641 CGGATGGGCACGCCCGTCCTGGAAGCACTGGGCGATGGGGAGTTTGTCAAATGCCTCCATTCTGTGGGGTGCCCTCTGCC
  721 TTTACAAAAGCCTTTGGTCAACAACTGGCCCTGCAACCCGGAGCTGACGCTCATCGCCCACCTGCCTGACCGCAGAGAGA
  801 TCATCTCCTTTGGCAGTGGGTACGGCGGGAACTCGCTGCTCGGGAAGAAGTGCTTTGCTCTCAGGATGGCCAGCCGGCTG
  881 GCCAAGGAGGAAGGGTGGCTGGCAGAGCACATGCTGATTCTGGGTATAACCAACCCTGAGGGTGAGAAGAAGTACCTGGC
  961 GGCCGCATTTCCCAGCGCCTGCGGGAAGACCAACCTGGCCATGATGAACCCCAGCCTCCCCGGGTGGAAGGTTGAGTGCG
1041 TCGGGGATGACATTGCCTGGATGAAGTTTGACGCACAAGGTCATTTAAGGGCCATCAACCCAGAAAATGGCTTTTTCGGT
1121 GTCGCTCCTGGGACTTCAGTGAAGACCAACCCCAATGCCATCAAGACCATCCAGAAGAACACAATCTTTACCAATGTGGC
1201 CGAGACCAGCGACGGGGGCGTTTACTGGGAAGGTATTGATGAGCCGCTAGCTTCAGGCGTCACCATCACGTCCTGGAAGA
1281 ATAAGGAGTGGAGCTCAGAGGATGGGGAACCTTGTGCCCACCCCAACTCGAGGTTCTGCACCCCTGCCAGCCAGTGCCCC
1361 ATCATTGATGCTGCCTGGGAGTCTCCGGAAGGTGTTCCCATTGAAGGCATTATCTTTGGAGGCCGTAGACCTGCTGGTGT
1441 CCCTCTAGTCTATGAAGCTCTCAGCTGGCAACATGGAGTCTTTGTGGGGGCGGCCATGAGATCAGAGGCCACAGCGGCTG
1521 CAGAACATAAAGGCAAAATCATCATGCATGACCCCTTTGCCATGCGGCCCTTCTTTGGCTACAACTTCGGCAAATACCTG
1601 GCCCACTGGCTTAGCATGGCCCAGCACCCAGCAGCCAAACTGCCCAAGATCTTCCATGTCAACTGGTTCCGGAAGGACAA
1681 GGAAGGCAAATTCCTCTGGCCAGGCTTTGGAGAGAACTCCAGGGTGCTGGAGTGGATGTTCAACCGGATCGATGGAAAAG
1761 CCAGCACCAAGCTCACGCCCATAGGCTACATCCCCAAGGAGGATGCCCTGAACCTGAAAGGCCTGGGGCACATCAACATG
1841 ATGGAGCTTTTCAGCACCTCCAAGGAATTCTGGGAGAAGGAGGTGGAAGACATCGAGAAGTATCTGGAGGATCAAGTCAA
1921 TGCCGACCTCCCCTGTGAAATCGAGAGAGAGATCCTTGCCTTGAAGCAAAGAATAAGCCACATGTAATCAGGGCCTGAGT
2001 GCTTTACCTTTAAAATCATTCCCTTTCCCATCCATAAGGTGCAGTAGGAGCAAGAGAGGGCAAGTGTTCC
Table A13N2. Protein sequence of variant NOV1a14p (underlined). (SEQ ID NO:106)
      1 MPPQLQNGLNLSAKVVQGSLDSLPQAVREFLENNAELCQPDHIHICDGSEEENGRLLGQMEEEGILRRLKKYDNCWLALT
    81 DPRDVARIESKTVIVTOEQRDTVPIPKTGLSQGRWIISEEDFEKAFNARFPGCMKGRTMYVIPFSMGPLGSPLSKIGIEL
  161 TDSPYVVASMRIMTRMGTPVLEALGDGEFVKCLHSVGCPLPLQKPLVNNWPCNPELTLIAHLPDRREIISFGSGYGGNSL
  241 LGKKCFALRMASRLAKEEGWLAEHNLILGITNPEGEKKYLAAAFPSACGKTNLANMNPSLPGWKVECVGDDIAWMKFDAQ
  321 GHLRAINPENGFFGVAPGTSVKTNPNAIKTIQKNTIFTNVAETSDGGVYWEGIDEPLASGVTITSWKNKEWSSEDGEPCA
  401 HPNSRFCTPASQCPIIDAAWESPEGVPIEGIIFGGRRPAGVPLVYEALSWQHGVFVGAAMRSEATAAAEHKGKIIMHDPF
  481 AMRPFFGYNFGKYLAHWLSMAQHPAAKLPKIFHVNWFRKDKEGKFLWPGFGENSRVLEWMFNRIDGKASTKLTPIGYIPK
  561 EDALNLKGLGHINMMELFSTSKEFWEKEVEDIEKYLEDQVNADLPCEIEREILALKQRISQM
Table A13N3. Alteration effect
Ile to Thr
Table A1301.
Nucleotide sequence of variant 13377375 NOV1a15n (underlined). A/G (SEQ ID NO:107)
      1 GAACACAAACTTGCTGGCGGGAAGAGCCCGGAAAGAAACCTGTGGATCTCCCTTCGAGATCATCCAAAGAGAAGAAAGGT
    81 GACCTCACATTCGTGCCCCTTAGCAGCACTCTGCAGAAATGCCTCCTCAGCTGCAAAACGGCCTGAACCTCTCGGCCAAA
  161 GTTGTCCAGGGAAGCCTGGACAGCCTGCCCCAGGCAGTGAGGGAGTTTCTCGAGAATAACGCTGAGCTGTGTCAGCCTGA
  241 TCACATCCACATCTGTGACGGCTCTGAGGAGGAGAATGGGCGGCTTCTGGGCCAGATGGAGGAAGAGGGCATCCTCAGGC
  321 GGCTGAAGAAGTATGACAACTGCTGGTTGGCTCTCACTGACCCCAGGGATGTGGCCAGGATCGAAAGCAAGACGGTTATC
  401 GTCACCCAAGAGCAAAGAGACACAGTGCCCATCCCCAAAACAGGCCTCAGCCAGCTCGGTCGCTGGATGTCAGAGGAGGA
  481 TTTTGAGAAAGCGTTCAATGCCAGGTTCCCAGGGTGCATGAAAGGTCGGACCATGTACGTCATCCCATTCAGCATGGGGC
  561 CGCTGGGCTCACCTCTGTCGAAGATCGGCATCGAGCTGACGGATTCGCCCTACGTGGTGGCCAGCATGCGGATCATGACG
  641 CGGATGGGCACGCCCGTCCTGGAAGCACTGGGCGATGGGGAGTTTGTCAAATGCCTCCATTCTGTGGGGTGCCCTCTGCC
  721 TTTACAAAAGCCTTTGGTCAACAACTGGCCCTGCAACCCGGAGCTGACGCTCATCGCCCACCTGCCTGACCGCAGAGAGA
  801 TCATCTCCTTTGGCAGTGGGTACGGCGGGAACTCGCTGCTCGGGAAGAAGTGCTTTGCTCTCAGCATGGCCACCCGGCTG
  881 GCCAAGGAGGAAGGGTCGCTGGCAGAGCACATGCTGATTCTGGGTATAACCAACCCTGAGGGTGAGAAGAAGTACCTGGC
  961 GGCCGCATTTCCCAGCGCCTGCGGGAAGACCAACCTGGCCATGATGAACCCCAGCCTCCCCGGGTGGAAGGTTGAGTGCG
1041 TCGGGGATGACATTGCCTGGATGAAGTTTGACGCACAAGGTCATTTAAGGGCCATCAACCCAGAAAATGGCTTTTTCGGT
1121 GTCGCTCCTGGGACTTCAGTGAAGACCAACCCCAATGCCATCAAGACCATCCAGAAGAACACAATCTTTACCAATGTGGC
1201 CGAGACCAGCGACGGGGGCGTTTACTGGGAAGGTATTGATGAGCCGCTAGCTTCAGGCGTCACCATCACGTCCTGGAAGA
1281 ATAAGGAGTGGAGCTCAGAGGATGGGGAACCTTGTGCCCACCCCAACTCGAGGTTCTGCACCCCTGCCAGCCAGTGCCCC
1361 ATCATTGATGCTGCCTGGGAGTCTCCGGAAGGTGTTCCCATTGAAGGCATTATCTTTGGAGGCCGTAGACCTGCTGGTGT
1441 CCCTCTAGTCTATGAAGCTCTCAGCTGGCAACATGGAGTCTTTGTGGGGGCGGCCATGAGATCAGAGGCCACAGCGGCTG
1521 CAGAACATAAACGCAAAATCATCATCCATGACCCCTTTGCCATGCGGCCCTTCTTTGGCTACAACTTCGGCAAATACCTG
1601 GCCCACTGGCTTAGCATGGCCCAGCACCCAGCAGCCAAACTGCCCAAGATCTTCCATGTCAACTGGTTCCGGAAGGACAA
1681 GGAAGGCAAATTCCTCTGGCCAGGCTTTGGAGAGAACTCCAGGGTGCTGGAGTGGATGTTCAACCGGATCGATGGAAAAG
1761 CCAGCACCAAGCTCACGCCCATAGGCTACATCCCCAAGGAGGATGCCCTGAACCTGAAAGGCCTGGGGCACATCAACATG
1841 ATGGAGCTTTTCAGCATCTCCAAGGAATTCTGGGAGAAGGAGGTGGGAGACATCGAGAAGTATCTGGAGGATCAAGTCAA
1921 TGCCGACCTCCCCTGTGAAATCGAGAGAGAGATCCTTGCCTTGAAGCAAAGAATAAGCCAGATGTAATCAGGGCCTGAGT
2001 GCTTTACCTTTAAAATCATTCCCTTTCCCATCCATAAGGTGCAGTAGGAGCAAGAGAGGGCAAGTGTTCC
Table A1302. Protein sequence of variant NOV1a15p (underlined). (SEQ ID NO:108)
      1 HPPQLQNGLNLSAKVVQGSLDSLPQAVREFLENNAELCQPDHIHICDGSEEENGRLLGQMEEEGILRRLKKYDNCWLALT
    81 DPRDVARIESKTVIVTQEQRDTVPIPKTGLSQLGRWMSEEDFEKAFNARFPGCMKGRTMYVIPFSMGPLGSPLSKIGIEL
  161 TDSPYVVASMRIMTRMGTPVLEALGDGEFVKCLHSVGCPLPLQKPLVNNWPCNPELTLIAHLPDRREIISFGSGYGGNSL
  241 LGKKCFALRMASRLAKEEGWLAEHNLILGITNPEGEKKYLAAAFPSACGKTNLANMNPSLPGWKVECVGDDIAWHKFDAQ
  321 GELRAINPENGFFGVAPGTSVKTNPNAIKTIQKNTIFTNVAETSDGGVYWEGIDEPLASGVTITSWKNKEWSSEDGEPCA
  401 HPNSRFGTPASQCPIIDAAWESPEGVPIEGIIFGGRRPAGVPLVYEALSWQHGVFVGAANRSEATAAAEHKGKIIMHDPF
  481 AMRPFFGYNFGKYLAHWLSMAQHPAAKLPKIFHVNWFRKDKEGKFLWPGFGENSRVLEWMFNRIDGKASTKLTPIGYIPK
  561 EDALNLKGLGHINNMELFSISKEFWEKEVGDIEKYLEDQVNADLPCEIEREILALKQRISQM
Table A1303. Alteration effect
Glu to Gly
Table A13P1.
Nucleotide sequence of variant 13377374 NOV1a16n (underlined). T/C (SEQ IDNO:109)
      1 GAACACAAACTTGCTGGCGGGAAGAGCCCGGAAAGAAACCTGTGGATCTCCCTTCGAGATCATCCAAAGAGAAGAAAGGT
    81 GACCTCACATTCGTGCCCCTTAGCAGCACTCTGCAGAAATGCCTCCTCAGCTGCAAAACGGCCTGAACCTCTCGGCCAAA
  161 GTTGTCCAGGGAAGCCTGGACAGCCTGCCCCAGGCAGTGAGGGAGTTTCTCGAGAATAACGCTGAGCTGTGTCAGCCTGA
  241 TCACATCCACATCTGTGACGGCTCTGAGGAGGAGAATGGGCGGCTTCTGGGCCAGATGGAGGAAGAGGGCATCCTCAGGC
  321 GGCTGAAGAAGTATGACAACTGCTGGTTGGCTCTCACTGACCCCAGGGATGTGGCCAGGATCGAAAGCAAGACGGTTATC
  401 GTCACCCAAGAGCAAAGAGACACAGTGCCCATCCCCAAAACAGGCCTCAGCCAGCTCGGTCGCTGGATGTCAGAGGAGGA
  481 TTTTGAGAAAGCGTTCAATGCCAGGTTCCCAGGGTGCATGAAAGGTCGCACCATGTACGTCATCCCATTCAGCATGGGGC
  561 CGCTGGGCTCACCTCTGTCGAAGATCGGCATCGAGCTGACGGATTCGCCCTACGTGGTGGCCAGCATGCGGATCATGACG
  641 CGGATGGGCACGCCCGTCCTGGAAGCACTGGGCGATGGGGAGTTTGTCAAATGCCTCCATTCTGTGGGGTGCCCTCTGCC
  721 TTTACAAAAGCCTTTGGTCAACAACTGGCCCTGCAACCCGGAGCTGACGCTCATCGCCCACCTGCCTGACCGCAGAGAGA
  801 TCATCTCCTTTGGCAGTGGGTACGGCGGGAACTCGCTGCTCGGGAAGAAGTGCTTTGCTCACAGGATGGCCAGCCGGCTG
  881 GCCAAGGAGGAAGGGTGGCTGGCAGAGCACATGCTGATTCTGGGTATAACCAACCCTGAGGGTGAGAAGAAGTACCTGGC
  961 GGCCGCATTTCCCAGCGCCTGCGGGAAGACCAACCTGGCCATGATGAACCCCAGCCTCCCCGGGTGGAAGGTTGAGTGCG
1041 TCGGGGATGACATTGCCTGGATGAAGTTTGACGCACAAGGTCATTTAAGGGCCATCAACCCAGAAAATGGCTTTTTCGGT
1121 GTCGCTCCTGGGACTTCAGTGAAGACCAACCCCAATGCCATCAAGACCATCCAGAAGAACACAATCTTTACCAATGTGGC
1201 CGAGACCAGCGACGGGGGCGTTTACTGGGAAGGTATTGATGAGCCGCTAGCTTCAGGCGTCACCATCACGTCCTGGAAGA
1281 ATAAGGAGTGGAGCTCAGAGGATGGGGAACCTTGTGCCCACCCCAACTCGAGGTTCTGCACCCCTGCCAGCCAGTGCCCC
1361 ATCATTGATGCTGCCTGGGAGTCTCCGGAAGGTGTTCCCATTGAAGGCATTATCTTTGGAGGCCGTAGACCTGCTGGTGT
1441 CCCTCTAGTCTATGAAGCTCTCAGCTGGCAACATGGAGTCTTTGTGGGGGCGGCCATGAGATCAGAGGCCACAGCGGCTG
1521 CAGAACATAAAGGCAAAATCATCATGCATGACCCCTTTGCCATGCGGCCCTTCTTTGGCTACAACTTCGGCAAATACCTG
1601 GCCCACTGGCTTAGCATGGCCCAGCACCCAGCAGCCAAACTGCCCAAGATCTTCCATGTCAACTGGTTCCGGAAGGACAA
1681 GGAAGGCAAATTCCTCTGGCCAGGCTTTGGAGAGAACTCCAGGGTGCTGGAGTGGATGTTCAACCGGATCGATGGAAAAG
1761 CCAGCACCAAGCTCACGCCCATAGGCTACATCCCCAAGGAGGATGCCCTGAACCTGAAAGGCCTGGGGCACATCAACATG
1841 ATGGAGCTTTTCAGCATCTCCAAGGAATTCTGGGAGAAGGAGGTGGAAGACATCGAGAAGTATCTGGAGGATCAAGTCAA
1921 TGCCGACCCCCCCTGTGAAATCGAGAGAGAGATCCTTGCCTTGAAGCAAAGAATAAGCCAGATGTAATCAGGGCCTGAGT
2001 GCTTTACCTTTAAAATCATTCCCTTTCCCATCCATAAGGTGCAGTAGGAGCAAGAGAGGGCAAGTGTTCC
Table A13P2. Protein sequence of variant NOV1a16p (underlined). (SEQ ID NO:110)
      1 MPPQLQNGLNLSAKVVQGSLDSLPQAVREFLENNAELCQPDHIHICDGSEEENGRLLGQMEEEGILRRLKKYDNCWLALT
    81 OP DVARIESKTVIVTQEQRDTVPIPKTGLSQLGRWMSEEDFEKAFNARFPGCMKGRTMYVIPFSMGPLGSPLSKIGIEL
  161 TDSPYVVASMRIMTRNGTPVLEALGDGEFVKCLHSVGCPLPLQKPLVNNWPCNPELTLIAHLPDRREIISFGSGYGGNSL
  241 LGKKCFALRNASRLAKEEGWLAEHMLILGITNPEGEKKYLAAAPPSACGKTNLAMNNPSLPGWKVECVGDDIAWMKFDAQ
  321 GHLRAINPENGFFGVAPGTSVKTNPNAIKTIQKNTIFTNVAETSDGGVYWEGIDEPLASGVTITSWKNKEWSSEDGEPCA
  401 HPNSRFCTPASQCPIIDAAWESPEGVPIEGIIFGGRRPAGVPLVYEALSWQHGVFVGAANRSEATAAAEHKGKIIMHDPF
  481 AMRPFFGYNFGKYLAHWLSMAQHPAAKLPKIFHVNWFRKDKEGKFLWPGFGENSRVLEWMFNRIDGKASTKLTPIGYIPK
  561 EDALNLKGLGHINMMELFSISKEFWEKEVEDIEKYLEDQVNADPPCEIEREILALKQRISQM
Table A13P3. Alteration effect
Leu to Pro
```

### EXAMPLE A5

### Expression Profile of the Human Cytosolic Phosphoenolpyruvate Carboxykinase (PEPCK) Gene

[0384] The protocol for quantitative expression analysis is disclosed in Example Q9.

[0385] Expression of gene CG101190-01 was assessed using the primer-probe set Ag1769, described in Table A14. Results of the RTQ-PCR runs are shown in Tables A15, A16, and A17.

TABLE A14
Probe Name Ag1769

| | | | Start | SEQ ID |
|---|---|---|---|---|
| Primers | Sequences | Length | Position | No |
| Forward | 5′-gcagaacataaaggcaaaatca-3′ | 22 | 1520 | 175 |
| Probe | TET-5′-tcatgcatgacccctttgccatg-3′- | 23 | 1542 | 176 |
| | TAMRA | | | |
| Reverse | 5′-caggtatttgccgaagttgtag-3′ | 22 | 1579 | 177 |

[0386] TABLE A15
Panel 1.3D

| | Rel. Exp. (%) |
|---|---|
| | Ag1769, Run |
| Tissue Name | 156228299 |
| Liver adenocarcinoma | 0.0 |
| Pancreas | 0.0 |
| Pancreatic ca. CAPAN 2 | 0.0 |
| Adrenal gland | 0.7 |
| Thyroid | 0.1 |
| Salivary gland | 0.0 |
| Pituitary gland | 5.0 |
| Brain (fetal) | 0.0 |
| Brain (whole) | 0.1 |
| Brain (amygdala) | 0.0 |
| Brain (cerebellum) | 0.0 |
| Brain (hippocampus) | 0.0 |
| Brain (substantia nigra) | 0.0 |
| Brain (thalamus) | 0.1 |
| Cerebral Cortex | 0.0 |
| Spinal cord | 0.0 |
| glio/astro U87-MG | 0.0 |
| glio/astro U-118-MG | 0.0 |
| astrocytoma SW1783 | 0.0 |
| neuro*; met SK-N-AS | 0.0 |
| astrocytoma SF-539 | 0.0 |
| astrocytoma SNB-75 | 0.0 |
| glioma SNB-19 | 0.0 |
| glioma U251 | 0.0 |
| glioma SF-295 | 0.0 |
| Heart (fetal) | 0.0 |
| Heart | 0.3 |
| Skeletal muscle (fetal) | 0.2 |
| Skeletal muscle | 0.0 |
| Bone marrow | 0.1 |
| Thymus | 0.2 |
| Spleen | 0.0 |
| Lymph node | 0.2 |
| Colorectal | 11.7 |
| Stomach | 0.1 |
| Small intestine | 2.0 |
| Colon ca. SW480 | 0.0 |
| Colon ca.* SW620(SW480 met) | 0.1 |
| Colon ca. HT29 | 0.0 |
| Colon ca. HCT-116 | 0.0 |
| Colon ca. CaCo-2 | 0.2 |
| Colon ca. tissue(ODO3866) | 1.0 |
| Colon ca. HCC-2998 | 0.0 |
| Gastric ca.* (liver met) NCI-N87 | 0.0 |
| Bladder | 0.0 |
| Trachea | 0.8 |
| Kidney | 29.5 |
| Kidney (fetal) | 32.3 |
| Renal ca. 786-0 | 0.0 |
| Renal ca. A498 | 0.0 |
| Renal ca. RXF 393 | 0.0 |
| Renal ca. ACHN | 0.0 |
| Renal ca. UO-31 | 0.0 |
| Renal ca. TK-10 | 0.0 |
| Liver | 100.0 |
| Liver (fetal) | 34.6 |
| Liver ca. (hepatoblast) HepG2 | 0.6 |
| Lung | 0.3 |
| Lung (fetal) | 0.1 |
| Lung ca. (small cell) LX-1 | 0.3 |
| Lung ca. (small cell) NCI-H69 | 0.0 |
| Lung ca. (s. cell var.) SHP-77 | 0.0 |
| Lung ca. (large cell)NCI-H460 | 0.0 |
| Lung ca. (non-sm. cell) A549 | 0.1 |
| Lung ca. (non-s. cell) NCI-H23 | 0.0 |
| Lung ca. (non-s. cell) HOP-62 | 0.0 |
| Lung ca. (non-s. cl) NCI-H522 | 0.0 |
| Lung ca. (squam.) SW 900 | 0.0 |
| Lung ca. (squam.) NCI-H596 | 0.0 |
| Mammary gland | 4.4 |
| Breast ca.* (pl. ef) MCF-7 | 0.1 |
| Breast ca.* (pl. ef) MDA-MB-231 | 0.0 |
| Breast ca.* (pl. ef) T47D | 0.0 |
| Breast ca. BT-549 | 0.0 |
| Breast ca. MDA-N | 0.0 |
| Ovary | 0.3 |
| Ovarian ca. OVCAR-3 | 0.5 |
| Ovarian ca. OVCAR-4 | 0.0 |
| Ovarian ca. OVCAR-5 | 0.1 |
| Ovarian ca. OVCAR-8 | 0.0 |
| Ovarian ca. IGROV-1 | 0.0 |
| Ovarian ca.* (ascites) SK-OV-3 | 0.0 |
| Uterus | 0.0 |
| Placenta | 0.0 |
| Prostate | 0.0 |
| Prostate ca.* (bone met)PC-3 | 0.0 |
| Testis | 0.0 |
| Melanoma Hs688(A).T | 0.0 |
| Melanoma* (met) Hs688(B).T | 0.0 |
| Melanoma UACC-62 | 0.0 |
| Melanoma M14 | 0.0 |
| Melanoma LOX IMVI | 0.0 |
| Melanoma* (met) SK-MEL-5 | 0.0 |
| Adipose | 3.8 |

[0387] TABLE A16
Panel 5 Islet

| | Rel. Exp. (%) |
|---|---|
| | Ag1769, Run |
| Tissue Name | 174269005 |
| 97457_Patient-02go_adipose | 3.1 |
| 97476_Patient-07sk_skeletal muscle | 0.1 |
| 97477_Patient-07ut_uterus | 0.0 |
| 97478_Patient-07pl_placenta | 0.0 |
| 99167_Bayer Patient 1 | 1.4 |
| 97482_Patient-08ut_uterus | 0.0 |
| 97483_Patient-08pl_placenta | 0.0 |
| 97486_Patient-09sk_skeletal muscle | 0.0 |
| 97487_Patient-09ut_uterus | 0.0 |
| 97488_Patient-09pl_placenta | 0.0 |
| 97492_Patient-10ut_uterus | 0.1 |
| 97493_Patient-10pl_placenta | 0.0 |
| 97495_Patient-11go_adipose | 3.2 |
| 97496_Patient-11sk_skeletal muscle | 0.0 |
| 97497_Patient-11ut_uterus | 0.0 |
| 97498_Patient-11pl_placenta | 0.0 |
| 97500_Patient-12go_adipose | 6.4 |
| 97501_Patient-12sk_skeletal muscle | 0.2 |
| 97502_Patient-12ut_uterus | 0.0 |
| 97503_Patient-12pl_placenta | 0.0 |
| 94721_Donor 2 U - A_Mesenchymal Stem Cells | 0.0 |
| 94722_Donor 2 U - B_Mesenchymal Stem Cells | 0.0 |
| 94723_Donor 2 U - C_Mesenchymal Stem Cells | 0.0 |
| 94709_Donor 2 AM - A_adipose | 0.9 |
| 94710_Donor 2 AM - B_adipose | 0.7 |
| 94711_Donor 2 AM - C_adipose | 0.7 |
| 94712_Donor 2 AD - A_adipose | 3.1 |
| 94713_Donor 2 AD - B_adipose | 5.8 |
| 94714_Donor 2 AD - C_adipose | 4.3 |
| 94742_Donor 3 U - A_Mesenchymal Stem Cells | 0.0 |
| 94743_Donor 3 U - B_Mesenchymal Stem Cells | 0.0 |
| 94730_Donor 3 AM - A_adipose | 0.3 |
| 94731_Donor 3 AM - B_adipose | 0.0 |
| 94732_Donor 3 AM - C_adipose | 0.0 |
| 94733_Donor 3 AD - A_adipose | 1.4 |
| 94734_Donor 3 AD - B_adipose | 0.4 |
| 94735_Donor 3 AD - C_adipose | 0.5 |
| 77138 Liver HepG2untreated | 18.7 |
| 73556_Heart_Cardiac stromal cells (primary) | 0.0 |
| 81735_Small Intestine | 16.6 |
| 72409_Kidney_Proximal Convoluted Tubule | 0.1 |
| 82685_Small intestine_Duodenum | 100.0 |
| 90650_Adrenal_Adrenocortical adenoma | 0.0 |
| 72410_Kidney_HRCE | 0.2 |
| 72411_Kidney_HRE | 0.0 |
| 73139_Uterus_Uterine smooth muscle cells | 0.0 |

[0388] TABLE A17
General_screening_panel_v1.7

| Tissue Name | A |
|---|---|
| Adipose | 13.4 |
| HUVEC | 0.0 |
| Melanoma* Hs688(A).T | 0.0 |
| Melanoma* Hs688(B).T | 0.0 |
| Melanoma (met) SK-MEL-5 | 0.0 |
| Testis | 0.2 |
| Prostate ca. (bone met) PC-3 | 0.0 |
| Prostate ca. DU145 | 0.0 |
| Prostate pool | 0.0 |
| Uterus pool | 0.0 |
| Ovarian ca. OVCAR-3 | 0.1 |
| Ovarian ca. (ascites) SK-OV-3 | 0.0 |
| Ovarian ca. OVCAR-4 | 0.4 |
| Ovarian ca. OVCAR-5 | 0.0 |
| Ovarian ca. IGROV-1 | 0.0 |
| Ovarian ca. OVCAR-8 | 0.0 |
| Ovary | 0.1 |
| Breast ca. MCF-7 | 0.0 |
| Breast ca. MDA-MB-231 | 0.0 |
| Breast ca. BT 549 | 0.0 |
| Breast ca. T47D | 0.0 |
| 113452 mammary gland | 0.0 |
| Trachea | 2.1 |
| Lung | 0.2 |
| Fetal Lung | 1.1 |
| Lung ca. NCI-N417 | 0.0 |
| Lung ca. LX-1 | 0.1 |
| Lung ca. NCI-H146 | 0.3 |
| Lung ca. SHP-77 | 0.0 |
| Lung ca. NCI-H23 | 0.0 |
| Lung ca. NCI-H460 | 0.0 |
| Lung ca. HOP-62 | 0.0 |
| Lung ca. NCI-H522 | 0.0 |
| Lung ca. DMS-114 | 0.0 |
| Liver | 65.1 |
| Fetal Liver | 100.0 |
| Kidney pool | 55.5 |
| Fetal Kidney | 2.7 |
| Renal ca. 786-0 | 0.0 |
| Renal ca. A498 | 0.0 |
| Renal ca. ACHN | 0.0 |
| Renal ca. UO-31 | 0.0 |
| Renal ca. TK-10 | 0.3 |
| Bladder | 0.1 |
| Gastric ca. (liver met.) NCI-N87 | 0.0 |
| Stomach | 0.0 |
| Colon ca. SW-948 | 2.0 |
| Colon ca. SW480 | 0.0 |
| Colon ca. (SW480 met) SW620 | 1.3 |
| Colon ca. HT29 | 0.0 |
| Colon ca. HCT-116 | 0.0 |
| Colon cancer tissue | 0.1 |
| Colon ca. SW1116 | 0.0 |
| Colon ca. Colo-205 | 11.5 |
| Colon ca. SW-48 | 0.1 |
| Colon | 19.6 |
| Small Intestine | 0.6 |
| Fetal Heart | 0.1 |
| Heart | 0.1 |
| Lymph Node Pool | 0.0 |
| Lymph Node pool 2 | 10.2 |
| Fetal Skeletal Muscle | 0.5 |
| Skeletal Muscle pool | 0.0 |
| Skeletal Muscle | 0.1 |
| Spleen | 0.2 |
| Thymus | 0.3 |
| CNS cancer (glio/astro) SF-268 | 0.0 |
| CNS cancer (glio/astro) T98G | 0.0 |
| CNS cancer (neuro; met) SK-N-AS | 0.0 |
| CNS cancer (astro) SF-539 | 0.0 |
| CNS cancer (astro) SNB-75 | 0.0 |
| CNS cancer (glio) SNB-19 | 0.0 |
| CNS cancer (glio) SF-295 | 0.0 |
| Brain (Amygdala) | 0.0 |
| Brain (Cerebellum) | 0.2 |
| Brain (Fetal) | 0.0 |
| Brain (Hippocampus) | 0.0 |
| Cerebral Cortex pool | 0.0 |
| Brain (Substantia nigra) | 0.0 |
| Brain (Thalamus) | 0.0 |
| Brain (Whole) | 0.3 |
| Spinal Cord | 0.0 |
| Adrenal Gland | 0.8 |
| Pituitary Gland | 9.3 |
| Salivary Gland | 0.2 |
| Thyroid | 0.4 |
| Pancreatic ca. PANC-1 | 0.0 |
| Pancreas pool | 0.1 |

Column A - Rel. Exp. (%) Ag1769, Run 317617203

[0389] Panel 1.3D Summary: Expression of the human cytosolic PEPCK gene was highest in liver (CT=24.6). Cytosolic PEPCK was expressed at moderate to high levels in adipose, mammary gland, kidney, colon, small intestine, heart, and adrenal gland. This expression pattern is consistent with the GeneCalling® results and with reports from the literature.

[0390] Panel 5 Islet Summary: Among the samples on this panel, expression of the human cytosolic PEPCK gene was highest in small intestine (CT=28.3). Lower levels of expression were also detected in liver, adipose and pancreatic islets of Langerhans.

[0391] General_screening_panel_v1.7 Summary: Ag1769 Highest expression of this gene was detected in liver (CT=23.4), kidney (CT=24.6), adipose (CT=26.31), colon (CT=25.7), lymph node (CT=26.7), and pituitary gland (CT=26.83). This gene encodes phosphoenolpyruvate carboxykinase (PEPCK). The cytosolic isoform of PEPCK regulates glyceroneogenesis in adipose tissue. The glycerol-3-phosphate product of glyceroneogenesis is used in triglyceride synthesis. Cytosolic PEPCK is upregulated in adipose tissue of obese AKR versus normal C57B1 adipose and may contribute to the obese phenotype. This hypothesis is supported by the fact that transgenic overexpression of cytosolic PEPCK in adipose is associated with increased glyceroneogenesis, increased adipocyte (fat cell) size and fat mass, and higher body weight (Sun Y, Liu S, Ferguson S, Wang L, Klepcyk P, Yun J S, Friedman J E. Phosphoenolpyruvate carboxykinase over-expression selectively attenuates insulin signaling and hepatic insulin sensitivity in transgenic mice. J Biol. Chem. 2002). Therapeutic modulation of this gene, expressed protein and/or use of antibodies or small molecule drugs targeting the gene or gene product are useful in the treatment of endocrine/metabolically related diseases, such as obesity and diabetes.

### EXAMPLE A6

### Pathways Relevant to the Etiology and Pathogenesis of Obesity and/or Diabetes

[0392] PathCalling screening identified significant protein-protein interactions for cytosolic Phosphoenolpyruvate Carboxykinase (PEPCK) with stathmin-like 4 and heme-regulated initiation factor 2-alpha kinase (HR1). Protocol for PathCalling is disclosed in Example Q10.

[0393] Stathmin is a ubiquitous phosphorylated protein thought to act as an intracellular relay for diverse regulatory pathways (Sobel A. Stathmin: a relay phosphoprotein for multiple signal transduction? Trends Biochem Sci 1991 August; 16 (8):301-5. PMID: 1957351). HRI is also widely expressed with significant transcript levels in adipose, muscle and liver and is activated by oxidative stress (Hwang S Y, Kim M K, Kim J C. Cloning of hHRI, human heme-regulated eukaryotic initiation factor 2alpha kinase: down-regulated in epithelial ovarian cancers. Mol Cells 2000 Oct. 31; 10 (5):584-91 PMID: 11101152). Oxidative stress has been associated with diabetes. It is possible that under conditions of oxidative stress, HRI will phosphorylate and activate cytosolic Phosphoenolpyruvate Carboxykinase.

[0394] The outcome of inhibiting the action of the human cytosolic Phosphoenolpyruvate Carboxykinase (PEPCK) gene would be a potential reduction of glyceroneogenesis, triglyceride deposition in adipose tissue, adipocyte (fat cell) size and fat mass, and a reduction in body weight. Inhibition of cytosolic PEPCK would also reduce hepatic gluconeogenesis and ameliorate the fasting hyperglycemia of Type 2 diabetes.

### EXAMPLE A7

### Assays Screening for Modulators of Phosphoenolpyruvate carboxykinase

[0395] A non-exhaustive list of cell lines that express the Phosphoenolpyruvate carboxykinase (PEPCK) gene can be obtained from the RTQ-PCR results shown herein. These and other Phosphoenolpyruvate carboxykinase (PEPCK) expressing cell lines could be used for screening purposes.

[0396] Screening for an inhibitor/antagonist of PEPCK could be accomplished with an in vitro glucose production assay. H4IIE cells transfected with recombinant cytosolic PEPCK would be tested for glucose production as described in Materials and Methods in Wang J C, Stafford J M, Scott D K, Sutherland C, Granner D K. The molecular physiology of hepatic nuclear factor 3 in the regulation of gluconeogenesis. J Biol Chem 275:14717-21, 2000, PMID: 10799560.

[0397] Our results indicate that a modulator of cytosolic Phosphoenolpyruvate Carboxykinase (PEPCK) activity, such as an inhibitor, activator, antagonist, or agonist of PEPCK may be useful for treatment of such disorders as obesity, diabetes, and insulin resistance, as well as for enhancement of insulin secretion.

B. NOV2—Transketolase

[0398] Transketolase is a thiamine-dependent enzyme that links the pentose phosphate pathway with the glycolytic pathway. The pentose phosphate pathway, which is active in most tissues, provides sugar phosphates for intermediary biosynthesis, especially nucleotide metabolism. The pentose pathway also generates the biosynthetic reducing power for the cell in the form of NADPH. Transketolase is directly involved in the branch of the pathway that channels excess sugar phosphates to glycolysis, enabling the production of NADPH to be maintained under different metabolic conditions. The pentose phosphate pathway is especially active in sites where production of fatty acids and steroid synthesis occurs because they require the reducing power of NADPH (Lewandowski P A, Cameron-Smith D, Jackson C J, Kultys E R, Collier G R. The role of lipogenesis in the development of obesity and diabetes in Israeli sand rats (Psammomys obesus). J Nutr 1998 November; 128 (11):1984-8. PMID: 9808653; Parks E J, Krauss R M, Christiansen M P, Neese R A, Hellerstein M K. Effects of a low-fat, high-carbohydrate diet on VLDL-triglyceride assembly, production, and clearance. J Clin Invest. 1999 October; 104 (8):1087-96. PMID: 10525047; Marques-Lopes I, Ansorena D, Astiasaran I, Forga L, Martinez J A. Postprandial de novo lipogenesis and metabolic changes induced by a high-carbohydrate, low-fat meal in lean and overweight men. Am J Clin Nutr. 2001 February; 73 (2):253-61. PMID: 11157321).

[0399] We found transketolase to be down-regulated in brown adipose tissue derived from mice with various body weights ranging from obese (sd4 compared to chow-fed mice) to heavily obese (ngsd7 compared to chow-fed mice) and hyperglycemic, heavily obese mice (hgsd7+compared to chow-fed mice) on a high fat diet; transketolase remained unchanged in white adipose from the same groups of mice. This down-regulation of transketolase is in conjunction with a down-regulation of several enzymes in the fatty acid synthesis pathway and the anaplerotic pathway, including ATP citrate lyase, fatty acid elongase, and malic enzyme, as well as, SREBP. This suggests that in brown adipose, fatty acid synthesis and lipogenesis are down-regulated as a compensatory mechanism to the high fat diet. Such a compensatory mechanism is not present in white adipose (Swierczynski J, Goyke E, Wach L, Pankiewicz A, Kochan Z, Adamonis W, Sledzinski Z, Aleksandrowicz Z. Comparative study of the lipogenic potential of human and rat adipose tissue. Metabolism. 2000 May; 49 (5):594-9. PMID: 10831168; Hellerstein M K. De novo lipogenesis in humans: metabolic and regulatory aspects. Eur J Clin Nutr. 1999 April; 53 Suppl 1:S53-65. Review. PMID: 10365981)

[0400] FIG. 1 summarizes the biochemistry surrounding the human Transketolase and potential assays that may be used to screen for antibody therapeutics or small molecule drugs to treat obesity and/or diabetes. FIG. 1 shows pentose phosphate pathway generating NADPH for fatty acid and steroid biosynthesis. The pathway has 1^{st} oxidative and 2^{nd} non-oxidative stage. The non-oxidative stage is link between pentose phosphate pathway and glycolysis, reactions of the pathway are cytoplasmic. Transketolase cofactors are thiamine pyrophosphate and Mg²⁺. (Frank T, Bitsch R, Maiwald J, Stein G. Alteration of thiamine pharmacokinetics by end-stage renal disease (ESRD). Int J Clin Pharmacol Ther 1999 September; 37 (9):449-55; Pietrzak I, Baczyk K. Erythrocyte transketolase activity and guanidino compounds in hemodialysis patients. Kidney Int Suppl 2001 February; 78:S97-101)

[0401] FIG. 2 suggests how alterations in expression of the human Transketolase and associated gene products function in the etiology and pathogenesis of obesity and/or diabetes. The scheme incorporates the unique findings of these discovery studies in conjunction with what has been reported in the literature. The outcome of inhibiting the action of the human Transketolase would be a reduction of Insulin Resistance, a major problem in obesity and/or diabetes.

[0402] Therefore, mimicking brown adipose in white adipose, by inhibiting transketolase, may decrease the amount of NADPH necessary for fatty acid synthesis and lipogenesis. The decrease of NADPH available for fatty acid synthesis and lipogenesis may force utilization of fat stores. Thus, a modulator of transketolase such as an antagonist or an inhibitior for transketolase may be beneficial for the treatment of obesity an/or diabetes. Furthermore, ihibition of production of fructose-6-phosphate through inhibition of transketolase may decrease the hexosamine pathway and may also have beneficial effects for insulin resistance. Cell lines expressing the Transketolase can be obtained from the RTQ-PCR results disclosed herein. These and other Transketolase expressing cell lines could be used for screening purposes.

[0403] Furthermore, our results indicate that a modulator of Transketolase activity, such as an inhibitor, activator, antagonist, or agonist of Transketolase may be useful for treatment of such disorders as obesity, diabetes, and insulin resistance, as well as for enhancement of insulin secretion.

Discovery Process

[0404] The following sections describe the study design(s) and the techniques used to identify the Transketolase encoded protein and any variants, thereof, as being suitable as diagnostic markers, targets for an antibody therapeutic and targets for a small molecule drugs for Obesity and Diabetes.

[0405] Obesity and Diabetes are major public health concerns in the developed and developing world. It is estimated that over half of the adult US population is overweight with a body mass index (BMI) greater than the upper limit of normal (25) where the BMI is defined as the weight (Kg)/[height (m)]². A common consequence of being overweight is hyperlipidemia and the development of insulin resistance. This is followed by the development of hyperglycemia, a hallmark of Type II diabetes. Left untreated, the hyperglycemia leads to microvascular disease and end organ damage that includes retinopathy, renal disease, cardiac disease, peripheral neuropathy and peripheral vascular compromise. Currently, over 16 million adults in the US are affected by Type II diabetes and the condition has now become rampant among school-age children as a consequence of the epidemic of obesity in that age group.

[0406] Diabetes mellitus is a disorder in which blood levels of glucose (a simple sugar) are abnormally high because the body doesn't release or respond to insulin adequately. Blood sugar (glucose) levels vary throughout the day, rising after a meal and returning to normal within 2 hours. Blood sugar levels are normally between 70 and 110 milligrams per deciliter (mg/dL) of blood in the morning after an overnight fast. They are usually lower than 120 to 140 mg/dL 2 hours after eating foods or drinking liquids containing sugar or other carbohydrates.

[0407] Insulin, a hormone released from the pancreas, is the primary substance responsible for maintaining appropriate blood sugar levels. Insulin allows glucose to be transported into cells so that they can produce energy or store glucose-derived enrgy until it's needed. The rise in blood sugar levels after eating or drinking stimulates the pancreas to produce insulin, preventing a greater rise in blood sugar levels and causing them to fall gradually. Because muscles use glucose for energy, blood sugar levels can also fall during physical activity.

[0408] Diabetes results when the body doesn't produce enough insulin to maintain normal blood sugar levels or when cells don't respond appropriately to insulin. In type II diabetes mellitus, the pancreas continues to manufacture insulin, sometimes even at higher than normal levels. However, the body develops resistance to its effects, resulting in a relative insulin deficiency.

[0409] The main goal of diabetes treatment is to keep blood sugar levels within the normal range as much as possible. Completely normal levels are difficult to maintain, but the more closely they can be kept within the normal range, the less likely that temporary or long-term complications will develop.

[0410] Therefore, a therapeutic that decreases insulin resistance and/or enhances insulin secretion would be beneficial in treatment of obesity and/or diabetes. Additionally, such a therapeutic would be beneficial in treatment of insulin resistance, a condition that often leads to the development of diabetes.

### EXAMPLE B1

### Mouse Dietary—Induced Obesity

[0411] A protocol for Mouse Dietary-Induced Obesity study is disclosed in Example Q1.

[0412] The predominant cause for obesity in clinical populations is excess caloric intake. This so-called diet-induced obesity (DIO) is mimicked in animal models (mouse strain C57BL/6) by feeding high fat diets of greater than 40% fat content. The DIO study was established to identify the gene expression changes contributing to the development and progression of diet-induced obesity. In addition, the study design sought to identify the factors that lead to the ability of certain individuals to resist the effects of a high fat diet and thereby prevent obesity. The sample groups for the study had body weights +1 S.D., +4 S.D. and +7 S.D. of the chow-fed controls (below). In addition, the biochemical profile of the +7 S.D. mice revealed a further stratification of these animals into mice that retained a normal glycemic profile in spite of obesity and mice that demonstrated hyperglycemia. Tissues examined included hypothalamus, brainstem, liver, retroperitoneal white adipose tissue (WAT), epididymal WAT, brown adipose tissue (BAT), gastrocnemius muscle (fast twitch skeletal muscle) and soleus muscle (slow twitch skeletal muscle). The differential gene expression profiles for these tissues revealed genes and pathways that can be used as therapeutic targets for obesity and/or diabetes. Protocol for differential gene expression analysis, GeneCalling®, is disclosed in Example Q7.

Results

[0413] A fragment of the mouse (mouse strain C57BL/6) Transketolase gene was initially found to be down-regulated by 1.7 fold in the brown adipose tissue of mice fed a high fat diet who reach 4 standard deviations of body weight when compared to chow fed mice relative to brown adipose of chow fed mice using CuraGen's GeneCalling® method of differential gene expression. A differentially expressed human gene fragment migrating, at approximately 385 nucleotides in length was definitively identified as a component of the human Transketolase cDNA. The method of competitive PCR was used for confirmation of the gene assessment. The electropherographic peaks corresponding to the gene fragment of the human Transketolase were ablated when a gene-specific primer (shown in Table B 1) competes with primers in the linker-adaptors during the PCR amplification. The peaks at 385 nt in length were ablated in the sample from both the chow fed mice and the mice on a high fat diet.

TABLE B1

The direct sequence of the 385 nucleotide-long gene fragment and the
gene-specific primers used for competitive PCR are indicated on the
cDNA sequence of the Transketolase fragment (SEQ ID NO:178) are shown
in bold. The gene-specific primers at the 5′ and 3′ ends of the
fragment are underlined.
Mouse transketolase (scm gb-u05 809_4) (fragment from 1151 to 1536 in
bold. band size: 386)

```
  670 ACATCAACCG CCTGGGCCAG AGCGACCCAG CCCCGCTGCA GCACCAGGTG GACATCTACC
  730 AGAAGCGCTG TGAGGCCTTT GGCTGGCACA CCATCATCGT GGACCGACAC AGCGTGGAGG
  790 AGCTGTGCAA GGCCTTTGGT CACGCCAAGC ACCAACCAAC AGCCATCATT GCCAAGACCT
  850 TCAAGGGCCG AGGGATCACA CGGATTGAAG ACAAGGAGGC GTGGCACGGG AAGCCCCTCC
  910 CCAAAAACAT GGCCGAGCAG ATTATCCAGG AGATTTACAG CCAGGTTCAG AGCAAAAAGA
  970 AGATCCTGGC CACGCCCCCT CAGGAGGATG CCCCATCCGT GGACATTGCT AACATCCGAA
1030 TGCCTACGCC ACCCAGCTAC AAAGTGGGGG ACAAGATAGC CACCCGGAAG GCCTATGGAC
1090 TGGCCCTCGC TAAGCTGGGC CACGCCAGTG ACCGTATCAT TGCCCTGGAT GGAGACACCA
1150 AGAATTCCAC CTTCTCGGAG CTCTTCAAAA AGGAGCACCC AGACCGGTTC ATTGAGTGCT
1210 ACATTGCCGA GCAAAACATG GTGAGCATTG CCGTGGGCTG TGCCACACGT GACCGGACAG
1270 TGCCCTTCTG CAGTACTTTC GCGGCCTTCT TCACACGGGC CTTCGACCAG ATTCGCATGG
1330 CCGCCATCTC TGAGAGCAAC ATCAACCTCT GTGGCTCCCA CTGTGGTGTG TCCATTGGGG
1390 AAGACGGGCC CTCTCAGATG GCCCTCGAAG ACCTGGCCAT GTTCCGGTCA GTCCCCATGT
1450 CCACCGTCTT TTACCCAAGC GATGGAGTTG CAACAGAGAA GGCAGTGGAG TTAGCAGCCA
1510 ACACAAAGGG CATTTGCTTC ATCCGGACCA GCCGCCCAGA GAATGCCATT ATTTATAGCA
1570 ACAATGAGGA TTTCCAGGTC GGCCAAGCCA AGGTGGTCCT GAAGAGCAAG GATGACCAAG
1630 TGACAGTGAT CGGGGCTGGT GTAACTCTGC ATGAGGCCTT GGCTGCTGCA GAGAGTCTAA
1690 AGAAAGATAA GATCAGCATC CGGGTGCTGG ATCCCTTCAC TATCAAGCCC CTGGACAGGA
1750 AACTCATCCT AGACTCTGCC CGAGCAACCA AAGGCAGGAT CCTCACCGTG GAGGACCACT
1810 ACTACGAAGG TGGCATAGGA GAGGCAGTGT CTGCTGCCGT AGTGGGTGAA CCTGGAGTGA
1870 CGGTCACTCG CCTGGCTGTC AGCCAAGTAC CACGAAGTGG CAAGCCAGCT GAGCTACTGA
1930 AGATGTTCGG TATTGACAAG GACGCCATTG TGCAAGCTGT GAAAGGCCTT GTCACCAAGG
1990 GCTAGGGAGG GCATGGGATG CTGGGTG
```

(gene length is 2516, only region from 670 to 2016 shown)

### EXAMPLE B2

### Identification of Human Transketolase Sequences

[0414] The sequence of Human Transketolase (Acc. No. CG175387-01) was derived by laboratory cloning of cDNA fragments, by in silico prediction of the sequence. cDNA fragments covering either the full length of the DNA sequence, or part of the sequence, or both, were cloned. In silico prediction was based on sequences available in CuraGen's proprietary sequence databases or in the public human sequence databases, and provided either the full-length DNA sequence, or some portion thereof. The protocol for identification of human sequence(s) is disclosed in Example Q8.

[0415] Table B2 shows protein alignment (ClustalW) of Human Transketolase sequence (CG175387-01; SEQ ID NO:8) and Mouse Transketolase sequence (SEQ ID NO:179) Table B3 shows sequence of Mouse Transketolase (SEQ ID NO:179).

[image]

[image]

TABLE B3
Mouse Transketolase (SEQ ID NO:179).

>U05809_Mouse
MEGYHKPDQQKLQALKDTANRLRISSIQATTAAGSGHPTSCCSAAELMAVLFFHTMRYKALDPRNPHNDR
FVLSKGHAAPILYAVWAEAGFLPEAELLNLRKISSDLDGHPVPKQAFTDVATGSLGQGLGAACGMAYTGK
YFDKASYRVYCMLGDGEVSEGSVWEAMAFAGIYKLDNLVAIFDINRLGQSDPAPLQHQVDIYQKRCEAFG
WHTIIVDGHSVEELCKAFGQAKHQPTAIIAKTFKGRGITGIEDKEAWHGKPLPKNMAEQIIQEIYSQVQS
KKKILATPPQEDAPSVDIANIRMPTPPSYKVGDKIATRKAYGLALAKLGHASDRIIALDGDTKNSTFSEL
FKKEHPDRFIECYIAEQNMVSIAVGCATRDRTVPFCSTFAAFFTRAFDQJRMAAISESNLNLCGSHCGVS
IGEDGPSQMALEDLAMFRSVPMSTVFYPSDGVATEKAVELAANTKGICFLRTSRPENAIIYSNNEDFQVG
QAKVVLKSKDDQVTVIGAGVTLHEALAAAESLKKDKISIRVLDPFTIKPLDRKLLLDSARATKGRILTVE
DHYYEGGIGEAVSAAVVGEPGVTVTRLAVSQVPRSGKPAELLKMFGIDKDAIVQAVKGLVTKG

[0416] The laboratory cloning was performed using one or more of the methods summarized in Example Q8. The NOV2 clone was analyzed, and the nucleotide and encoded polypeptide sequences are shown in Table B4.

TABLE B4
NOV2 Sequence Analysis

| | | |
|---|---|---|
| NOV2a, CG175387-01 | SEQ ID NO:7 | 2078 bp |
| DNA Sequence | ORF Start: ATG at 80 | ORF Stop: TAG at 1949 |

GGCACGAGGGCCTGTCGCCGCGGGAGCAGCCGCTATCTCTGTGTGTCCGCGTGTGCGCCCGGTCCCCG
CCTGCCGCACCATGGAGAGCTACCACAAGCCTGACCAGCAGAAGCTGCAGGCCTTGAAGGACACGGCC
AACCGCCTACGTATCAGCTCCATCCAGGCCACCACTGCGGCGGGCTCTGGCCACCCCACGTCATGCTG
CAGCGCCGCAGAGATCATGGCTGTCCTCTTTTTCCACACCATGCGCTACAAGTCCCAGGACCCCCGGA
ATCCGCACAATGACCGCTTTGTGCTCTCCAAGGGCCATGCAGCTCCCATCCTCTACGCGGTCTGGGCT
GAAGCTGGTTTCCTGGCCGAGGCGGAGCTGCTGAACCTGAGGAAGATCAGCTCCGACTTGGACGGGCA
CCCGGTCCCGAAACAAGCTTTCACCGACGTGGCCACTGGCTCCCTGGGCCAGGGCCTCGGGGCCGCTT
GTGGGATGGCCTACACCGGCAAATACTTCGACAAGGCCAGCTACCGAGTCTATTGCTTGCTGGGAGAT
GGGGAGCTGTCAGAGGGCTCTGTATGGGAGGCCATGGCCTTCGCCAGCATCTATAAGCTGGACAACCT
TGTGGCCATTCTAGACATCAATCGCCTGGGCCAGAGTGACCCGGCCCCGCTGCAGCACCAGATGGACA
TCTACCAGAAGCGGTGCGAGGCCTTCGGTTGGCATGCCATCATCGTGGATGGACACAGCGTGGAGGAG
CTGTGCAAGGCCTTTGGCCAGGCCAAGCACCAGCCAACAGCCATCATTGCCAAGACCTTCAAGGGCCG
AGGGATCACGGGGGTAGAAGATAAGGAGTCTTGGCATGGGAAGCCCCTCCCCAAAAACATGGCTGAGC
AGATCATCCAGGAGATCTACAGCCAGATCCAGAGCAAAAAGAAGATCCTGGCAACCCCTCCACAGGAG
GACGCACCCTCAGTGGACATTGCCAACATCCGCATGCCCAGCCTGCCCAGCTACAAAGTTGGGGACAA
GATAGCCACCCGCAAGGCCTACGGGCAGGCACTGGCCAAGCTGGGCCATGCCAGTGACCGCATCATCG
CCCTGGATGGGGACACCAAAAATTCCACCTTCTCGGAGATCTTCAAAAAGGAGCACCCGGACCGCTTC
ATCGAGTGCTACATTGCCGAGCAGAACATGGTGAGCATCGCGGTGGGCTGTGCCACCCGCAACAGGAC
GGTGCCCTTCTGCAGCACTTTTGCAGCCTTCTTCACGCGGGCCTTTGACCAGATTCGCATGGCCGCCA
TCTCCGAGAGCAACATCAACCTCTGCGGCTCCCACTGCGGCGTTTCCATCGGGGAAGACGGGCCCTCC
CAGATGGCCCTAGAAGATCTGGCTATGTTTCGGTCAGTCCCCACATCAACTGTCTTTTACCCAAGTGA
TGGCGTTGCTACAGAGAAGGCAGTGGAACTAGCCGCCAATACAAAGGGTATCTGCTTCATCCGGACCA
GCCGCCCAGAAAATGCCATCATCTATAACAACAATGAGGACTTCCAGGTCGGACAAGCCAAGGTGGTC
CTGAAGAGCAAGGATGACCAGGTGACCGTTATCGGGGCTGGGGTGACCCTGCACGAGGCCTTGGCCGC
TGCCGAACTGCTGAAGAAAGAAAAGATCAACATCCGCGTGCTGGACCCCTTCACCATCAAGCCCCTGG
ACAGAAAACTCATTCTCGACAGCGCTCGTGCCACCAAGGGCAGGATCCTCACCGTGGAGGACCATTAT
TATGAAGGTGGCATTGGTGAGGCTGTGTCCAGTGCAGTAGTGGGCGAGCCTGGCATCACTGTCACCCA
CCTGGCAGTTAACCGGGTACCAAGAAGTGGGAAGCCAGCTGAGCTGCTGAAGATGTTTGGTATCGACA
GGGATGCCATTGCACAAGCTGTGAGGGGCCTCATCACCAAGGCCTAGGGCGGGTATGAAGTGTGGGGC
GGGGGTCTATACATTCCTGAGATTCTGGGAAAGGTGCTCAAAGATGTACTGAGAGGAGGGGTAAATAT
ATGTTTTGAGAAAAATGAAAAAAAAAAAAAAAAAAAAA

| | | | |
|---|---|---|---|
| NOV2a, CG175387-01 | | | |
| Protein Sequence | SEQ ID NO:8 | 623 aa | MW at 67876.8 kD |

MESYHKPDQQKLQALKDTANRLRISSIQATTAAGSGHPTSCCSAAEIMAVLFFHTMRYKSQDPRNPHN
DRFVLSKGHAAPILYAVWAEAGFLAEAELLNLRKISSDLDGHPVPKQAFTDVATGSLGQGLGAACGMA
YTGKYFDKASYRVYCLLGDGELSEGSVWEAMAFASIYKLDNLVAILDINRLGQSDPAPLQHQMDIYQK
RCEAFGWHAIIVDGHSVEELCKAFGQAKHQPTAIIAKTFKGRGITGVEDKESWHGKPLPKNMAEQIIQ
EIYSQIQSKKKILATPPQEDAPSVDIANIRMPSLPSYKVGDKIATRKAYGQALAKLGHASDRIIALDG
DTKNSTFSEIFKKEHPDRFIECYIAEQNNVSIAVGCATRNRTVPFCSTFAAFFTRAFDQIRMAAISES
NINLCGSHCGVSIGEDGPSQMALEDLAMFRSVPTSTVFYPSDGVATEKAVELAANTKGICFIRTSRPE
NAIIYNNNEDFQVGQAKVVLKSKDDQVTVIGAGVTLHEALAAAELLKKEKINIRVLDPFTIKPLDRKL
ILDSARATKGRILTVEDHYYEGGIGEAVSSAVVGEPGITVTHLAVNRVPRSGKPAELLKMFGIDRDAI
AQAVRGLITKA

| | | |
|---|---|---|
| NOV2b, CG175387-03 | SEQ ID NO:9 | 1927 bp |
| DNA Sequence | ORF Start: at 2 | ORF Stop: TAG at 1886 |

TCATCATCACCACCATCACGAGAGCTACCACAAGCCTGACCAGCAGAAGCTGCAGGCCTTGAAGGACA
CGGCCAACCGCCTACGTATCAGCTCCATCCAGGCCACCACTGCGGCGGGCTCTGGCCACCCCACGTCA
TGCTGCAGCGCCGCAGAGATCATGGCTGTCCTCTTTTTCCACACCATGCGCTACAAGTCCCAGGACCC
CCGGAATCCGCACAATGACCGCTTTGTGCTCTCCAAGGGCCATGCAGCTCCCATCCTCTACGCGGTCT
GGGCTGAAGCTGGTTTCCTGGCCGAGGCGGAGCTGCTGAACCTGAGGAAGATCAGCTCCGACTTGGAC
GGGCACCCGGTCCCGAAACAAGCTTTCACCGACGTGGCCACTGGCTCCCTGGGCCAGGGCCTCGGGGC
CGCTTGTGGGATGGCCTACACCGGCAAATACTTCGACAAGGCCAGCTACCGAGTCTATTGCTTGCTGG
GAGACGGGGAGCTGTCAGAGGGCTCTGTATGGGAGGCCATGGCCTTCGCCAGCATCTATAAGCTGGAC
AACCTTGTGGCCATTCTAGACATCAATCGCCTGGGCCAGAGTGACCCGGCCCCACTGCAGCACCAGAT
GGACATCTACCAGAAGCGGTGCGAGGCCTTCGGTTGGCATGCCATCATCGTGGATGGACACAGCGTGG
AGGAGCTGTGCAAGGCCTTTGGCCAGGCCAAGCACCAGCCAACAGCCATCATTGCCAAGACCTTCAAG
GGCCGAGGGATCACGGGGGTAGAAGATAAGGAGTCTTGGCATGGGAAGCCCCTCCCCAAAAACATGGC
TGAGCAGATCATCCAGGAGATCTACAGCCAGATCCAGAGCAAAAAGAAGATCCTGGCAACCCCTCCAC
AGGAGGACGCACCCTCAGTGGACATTGCCAACATCCGCATGCCCAGCCTGCCCAGCTACAAAGTTGGG
GACAAGATAGCCACCCGCAAGGCCTACGGGCAGGCACTGGCCAAGCTGGGCCATGCCAGTGACCGCAT
CATCGCCCTGGATGGGGACACCAAAAATTCCACCTTCTCGGAGATCTTCAAAAAGGAGCACCCGGACC
GCTTCATCGAGTGCTACATTGCTGAGCAGAACATGGTGAGCATCGCGGTGGGCTGTGCCACCCGCAAC
AGGACGGTGCCCTTCTGCAGCACTTTTGCAGCCTTCTTCACGCGGGCCTTTGACCAGATTCGCATGGC
CGCCATCTCCGAGAGCAACATCAACCTCTGCGGCTCCCACTGCGGCGTTTCCATCGGGGAAGACGGGC
CCTCCCAGATGGCCCTAGAAGATCTGGCTATGTTTCGGTCAGTCCCCACATCAACTGTCTTTTACCCA
AGTGATGGCGTTGCTACAGAGAAGGCAGTGGAACTAGCCGCCAATACAAAGGGTATCTGCTTCATCCG
GACCAGCCGCCCAGAAAATGCCATCATCTATAACAACAATGAGGACTTCCAGGTCGGACAAGCCAAGG
TGGTCCTGAAGAGCAAGGATGACCAGGTGACCGTTATCGGGGCTGGGGTGACCCTGCACGAGGCCTTG
GCCGCTGCCGAACTGCTGAAGAAAGAAAAGATCAACATCCGCGTGCTGGACCCCTTCACCATCAAGCC
CCTGGACAGAAAACTCATTCTCGACAGCGCTCGTGCCACCAAGGGCAGGATCCTCACCGTGGAGGACC
ATTATTATGAAGGTGGCATTGGTGAGGCTGTGTCCAGTGCAGTAGTGGGCGAGCCTGGCATCACTGTC
ACCCACCTGGCAGTTAACCGGGTACCAAGAAGTGGGAAGCCGGCTGAGCTGCTGAAGATGTTTGGTAT
CGACAGGGATGCCATTGCACAAGCTGTGAGGGGCCTCATCACCAAGGCCTAGGCAGGTGCGGCCGCAC
TCGAGCACCACCACCACCACCAC

| | | | |
|---|---|---|---|
| NOV2b, CG175387-03 | | | |
| Protein Sequence | SEQ ID NO:10 | 628 aa | MW at 68568.4 kD |

HHHHHHESYHKPDQQKLQALKDTANRLRISSIQATTAAGSGHPTSCCSAAEIMAVLFFHTMRYKSQDP
RNPHNDRFVLSKGHAAPILYAVWAEAGFLAEAELLNLRKISSDLDGHPVPKQAFTDVATGSLGQGLGA
ACGMAYTGKYFDKASYRVYCLLGDGELSEGSVWEAMAFASIYKLDNLVAILDINRLGQSDPAPLQHQM
DIYQKRCEAFGWHAIIVDGHSVEELCKAFGQAKHQPTAIIAKTFKGRGITGVEDKESWHGKPLPKNMA
EQIIQEIYSQIQSKKKILATPPQEDAPSVDIANIRNPSLPSYKVGDKIATRKAYGQALAKLGHASDRI
IALDGDTKNSTFSEIFKKEHPDRFIECYIAEQNMVSIAVGCATRNRTVPFCSTFAAFFTRAFDQIRMA
AISESNINLCGSHCGVSIGEDGPSQMALEDLANFRSVPTSTVFYPSDGVATEKAVELAANTKGICFIR
TSRPENAIIYNNNEDFQVGQAKVVLKSKDDQVTVIGAGVTLHEALAAAELLKKEKINIRVLDPFTIKP
LDRKLILDSARATKGRILTVEDHYYEGGIGEAVSSAVVGEPGITVTHLAVNRVPRSGKPAELLKMFGI
DRDAIAQAVRGLITKA

| | | |
|---|---|---|
| NOV2c, 267254044 | SEQ ID NO:11 | 1897 bp |
| DNA Sequence | ORF Start: at 3 | ORF Stop: TAG at 1884 |

CACCGAATTCCACCATGGAGAGCTACCACAAGCCTGACCAGCAGAAGCTGCAGGCCTTGAAGGACACG
GCCAACCGCCTACGTATCAGCTCCATCCAGGCCACCACTGCGGCGGGCTCTGGCCACCCCACGTCATG
CTGCAGCGCCGCAGAGATCATGGCTGTCCTCTTTTTCCACACCATGCGCTACAAGTCCCAGGACCCCC
GGAATCCGCACAATGACCGCTTTGTGCTCTCCAAGGGCCATGCAGCTCCCATCCTCTACGCGGTCTGG
GCTGAAGCTGGTTTCCTGGCCGAGGCGGAGCTGCTGAACCTGAGGAAGATCAGCTCCGACTTGGACGG
GCACCCGGTCCCGAAACAAGCTTTCACCGACGTGGCCACTGGCTCCCTGGGCCAGGGCCTCGGGGCCG
CTTGTGGGATGGCCTACACCGGCAAATACTTCGACAAGGCCAGCTACCGAGTCTATTGCTTGCTGGGA
GATGGGGAGCTGTCAGAGGGCTCTGTATGGGAGGCCATGGCCTTCGCCAGCATCTATAAGCTGGACAA
CCTTGTGGCCATTCTAGACATCAATCGCCTGGGCCAGAGTGACCCGGCCCCGCTGCAGCACCAGATGG
ACATCTACCAGAAGCGGTGCGAGGCCTTCGGTTGGCATGCCATCATCGTGGATGGACACAGCGTGGAG
GAGCTGTGCAAGGCCTTTGGCCAGGCCAAGCACCAGCCAACAGCCATCATTGCCAAGACCTTCAAGGG
CCGAGGGATCACGGGGGTAGAAGATAAGGAGTCTTGGCATGGGAAGCCCCTCCCCAAAAACATGGCTG
AGCAGATCATCCAGGAGATCTACAGCCAGATCCAGAGCAAAAAGAAGATCCTGGCAACCCCTCCACAG
GAGGACGCACCCTCAGTGGACATTGCCAACATCCGCATGCCCAGCCTGCCCAGCTACAAAGTTGGGGA
CAAGATAGCCACCCGCAAGGCCTACGGGCAGGCACTGGCCAAGCTGGGCCATGCCAGTGACCGCATCA
TCGCCCTGGATGGGGACACCAAAAATTCCACCTTCTCGGAGATCTTCAAAAAGGAGCACCCGGACCGC
TTCATCGAGTGCTACATTGCCGAGCAGAACATGGTGAGCATCGCGGTGGGCTGTGCCACCCGCAACAG
GACGGTGCCCTTCTGCAGCACTTTTGCAGCCTTCTTCACGCGGGCCTTTGACCAGATTCGCATGGCCG
CCATCTCCGAGAGCAACATCAACCTCTGCGGCTCCCACTGCGGCGTTTCCATCGGGGAAGACGGGCCC
TCCCAGATGGCCCTAGAAGATCTGGCTATGTTTCGGTCAGTCCCCACATCAACTGTCTTTTACCCAAG
TGATGGCGTTGCTACAGAGAAGGCAGTGGAACTAGCCGCCAATACAAAGGGTATCTGCTTCATCCGGA
CCAGCCGCCCAGAAAATGCCATCATCTATAACAACAATGAGGACTTCCAGGTCGGACAAGCCAAGGTG
GTCCTGAAGAGCAAGGATGACCAGGTGACCGTTATCGGGGCTGGGGTGACCCTGCACGAGGCCTTGGC
CGCTGCCGAACTGCTGAAGAAAGAAAAGATCAACATCCGCGTGCTGGACCCCTTCACCATCAAGCCCC
TGGACAGAAAACTCATTCTCGACAGCGCTCGTGCCACCAAGGGCAGGATCCTCACCGTGGAGGACCAT
TATTATGAAGGTGGCATTGGTGAGGCTGTGTCCAGTGCAGTAGTGGGCGAGCCTGGCATCACTGTCAC
CCACCTGGCAGTTAACCGGGTACCAAGAAGTGGGAAGCCAGCTGAGCTGCTGAAGATGTTTGGTATCG
ACAGGGATGCCATTGCACAAGCTGTGAGGGGCCTCATCACCAAGGCCTAGGCGGCCGCTAT

| | | | |
|---|---|---|---|
| NOV2c, 267254044 | | | |
| Protein Sequence | SEQ ID NO:12 | 627 aa | MW at 68276.2 kD |

PMSTMESYHKPDQQKLQALKDTANRLRISSIQATTAAGSGHPTSCCSAAEIMAVLFFHTMRYKSQDPR
NPHNDRFVLSKGHAAPILYAVWAEAGFLAEAELLNLRKISSDLDGHPVPKQAFTDVATGSLGQGLGAA
CGMAYTGKYFDKASYRVYCLLGDGELSEGSVWEAMAFASIYKLDNLVAILDINRLGQSDPAPLQHQMD
IYQKRCEAFGWHAIIVDGHSVEELCKAFGQAKHQPTAIIAKTFKGRGITGVEDKESWHGKPLPKNMAE
QIIQEIYSQIQSKKKILATPPQEDAPSVDIANIRMPSLPSYKVGDKIATRKAYGQALAKLGHASDRII
ALDGDTKNSTFSEIFKKEHPDRFIECYIAEQNMVSIAVGCATRNRTVPFCSTFAAFFTRAFDQIRMAA
ISESNINLCGSHCGVSIGEDGPSQMALEDLAMFRSVPTSTVFYPSDGVATEKAVELAANTKGICFIRT
SRPENAIIYNNNEDFQVGQAKVVLKSKDDQVTVIGAGVTLHEALAAAELLKKEKINIRVLDPFTIKPL
DRKLILDSARATKGRILTVEDHYYEGGIGEAVSSAVVGEPGITVTHLAVNRVPRSGKPAELLKMFGID
RDAIAQAVRGLITKA

| | | |
|---|---|---|
| NOV2d, GG175387-02 | SEQ ID NO:13 | 1897 bp |
| DNA Sequence | ORF Start: at 3 | ORF Stop: TAG at 1884 |

CACCGAATTCCACCATGGAGAGCTACCACAAGCCTGACCAGCAGAAGCTGCAGGCCTTGAAGGACACG
GCCAACCGCCTACGTATCAGCTCCATCCAGGCCACCACTGCGGCGGGCTCTGGCCACCCCACGTCATG
CTGCAGCGCCGCAGAGATCATGGCTGTCCTCTTTTTCCACACCATGCGCTACAAGTCCCAGGACCCCC
GGAATCCGCACAATGACCGCTTTGTGCTCTCCAAGGGCCATGCAGCTCCCATCCTCTACGCGGTCTGG
GCTGAAGCTGGTTTCCTGGCCGAGGCGGAGCTGCTGAACCTGAGGAAGATCAGCTCCGACTTGGACGG
GCACCCGGTCCCGAAACAAGCTTTCACCGACGTGGCCACTGGCTCCCTGGGCCAGGGCCTCGGGGCCG
CTTGTGGGATGGCCTACACCGGCAAATACTTCGACAAGGCCAGCTACCGAGTCTATTGCTTGCTGGGA
GATGGGGAGCTGTCAGAGGGCTCTGTATGGGAGGCCATGGCCTTCGCCAGCATCTATAAGCTGGACAA
CCTTGTGGCCATTCTAGACATCAATCGCCTGGGCCAGAGTGACCCGGCCCCGCTGCAGCACCAGATGG
ACATCTACCAGAAGCGGTGCGAGGCCTTCGGTTGGCATGCCATCATCGTGGATGGACACAGCGTGGAG
GAGCTGTGCAAGGCCTTTGGCCAGGCCAAGCACCAGCCAACAGCCATCATTGCCAAGACCTTCAAGGG
CCGAGGGATCACGGGGGTAGAAGATAAGGAGTCTTGGCATGGGAAGCCCCTCCCCAAAAACATGGCTG
AGCAGATCATCCAGGAGATCTACAGCCAGATCCAGAGCAAAAAGAAGATCCTGGCAACCCCTCCACAG
GAGGACGCACCCTCAGTGGACATTGCCAACATCCGCATGCCCAGCCTGCCCAGCTACAAAGTTGGGGA
CAAGATAGCCACCCGCAAGGCCTACGGGCAGGCACTGGCCAAGCTGGGCCATGCCAGTGACCGCATCA
TCGCCCTGGATGGGGACACCAAAAATTCCACCTTCTCGGAGATCTTCAAAAAGGAGCACCCGGACCGC
TTCATCGAGTGCTACATTGCCGAGCAGAACATGGTGAGCATCGCGGTGGGCTGTGCCACCCGCAACAG
GACGGTGCCCTTCTGCAGCACTTTTGCAGCCTTCTTCACGCGGGCCTTTGACCAGATTCGCATGGCCG
CCATCTCCGAGAGCAACATCAACCTCTGCGGCTCCCACTGCGGCGTTTCCATCGGGGAAGACGGGCCC
TCCCAGATGGCCCTAGAAGATCTGGCTATGTTTCGGTCAGTCCCCACATCAACTGTCTTTTACCCAAG
TGATGGCGTTGCTACAGAGAAGGCAGTGGAACTAGCCGCCAATACAAAGGGTATCTGCTTCATCCGGA
CCAGCCGCCCAGAAAATGCCATCATCTATAACAACAATGAGGACTTCCAGGTCGGACAAGCCAAGGTG
GTCCTGAAGAGCAAGGATGACCAGGTGACCGTTATCGGGGCTGGGGTGACCCTGCACGAGGCCTTGGC
CGCTGCCGAACTGCTGAAGAAAGAAAAGATCAACATCCGCGTGCTGGACCCCTTCACCATCAAGCCCC
TGGACAGAAAACTCATTCTCGACAGCGCTCGTGCCACCAAGGGCAGGATCCTCACCGTGGAGGACCAT
TATTATGAAGGTGGCATTGGTGAGGCTGTGTCCAGTGCAGTAGTGGGCGAGCCTGGCATCACTGTCAC
CCACCTGGCAGTTAACCGGGTACCAAGAAGTGGGAAGCCAGCTGAGCTGCTGAAGATGTTTGGTATCG
ACAGGGATGCCATTGCACAAGCTGTGAGGGGCCTCATCACCAAGGCCTAGGCGGCCGCTAT

| | | | |
|---|---|---|---|
| NOV2d, CG175387-02 | | | |
| Protein Sequence | SEQ ID NO:14 | 627 aa | MW at 68276.2 kD |

PNSTMESYHKPDQQKLQALKDTANRLRISSIQATTAAGSGHPTSCCSAAEIMAVLFFHTMRYKSQDPR
NPHNDRFVLSKGHAAPILYAVWAEAGFLAEAELLNLRKISSDLDGHPVPKQAFTDVATGSLGQGLGAA
CGMAYTGKYFDKASYRVYCLLGDGELSEGSVWEAMAFASIYKLDNLVAILDINRLGQSDPAPLQHQMD
IYQKRCEAFGWHAIIVDGHSVEELCKAFGQAKHQPTAIIAKTFKGRGITGVEDKESWHGKPLPKNMAE
QIIQEIYSQIQSKKKILATPPQEDAPSVDIANIRMPSLPSYKVGDKIATRKAYGQALAKLGHASDRII
ALDGDTKNSTFSEIFKKEHPDRFIECYIAEQNMVSIAVGCATRNRTVPFCSTFAAFFTRAFDQIRMAA
ISESNINLCGSHCGVSIGEDGPSQMALEDLANFRSVPTSTVFYPSDGVATEKAVELAANTKGICFIRT
SRPENAIIYNNNEDFQVGQAKVVLKSKDDQVTVIGAGVTLHEALAAAELLKKEKINIRVLDPFTIKPL
DRKLILDSARATKGRILTVEDHYYEGGIGEAVSSAVVGEPGITVTHLAVNRVPRSGKPAELLKMFGID
RDAIAQAVRGLITKA

| | | |
|---|---|---|
| NOV2e, CG175387-04 | SEQ ID NO:15 | 1942 bp |
| DNA Sequence | ORF Start: ATG at 138 | ORF Stop: TAG at 1884 |

AGAGCTACCACAAGCCTGACCAGCAGAAGCTGCAGGCCTTGAAGGACACGGCCAACCGCCTACGTATC
AGCTCCATCCAGGCCACCACTGCGGCGGGCTCTGGCCACCCCACGTCATGCTGCAGCGCCGCAGAGAT
CATGGCTGTCCTCTTTTTCCACACCATGCGCTACAAGTCCCAGGACCCCCGGAATCCGCACAATGACC
GCTTTGTGCTCTCCAAGGGCCATGCAGCTCCCATCCTCTACGCGGTCTGGGCTGAAGCTGGTTTCCTG
GCCGAGGCGGAGCTGCTGAACCTGAGGAAGATCAGCTCCGACTTGGACGGGCACCCGGTCCCGAAACA
AGCTTTCACCGACGTGGCCACTGGCTCCCTGGGCCAGGGCCTCGGGGCCGCTTGTGGGATGGCCTACA
CCGGCAAATACTTCGACAAGGCCAGCTACCGAGTCTATTGCTTGCTGGGAGATGGGGAGCTGTCAGAG
GGCTCTGTATGGGAGGCCATGGCCTTCGCCAGCATCTATAAGCTGGACAACCTTGTGGCCATTCTAGA
CATCAATCGCCTGGGCCAGAGTGACCCGGCCCCGCTGCAGCACCAGATGGACATCTACCAGAAGCGGT
GCGAGGCCTTCGGTTGGCATGCCATCATCGTGGATGGACACAGCGTGGAGGAGCTGTGCAAGGCCTTT
GGCCAGGCCAAGCACCAGCCAACAGCCATCATTGCCAAGACCTTCAAGGGCCGAGGGATCACGGGGGT
AGAAGATAAGGAGTCTTGGCATGGGAAGCCCCTCCCCAAAAACATGGCTGAGCAGATCATCCAGGAGA
TCTACAGCCAGATCCAGAGCAAAAAGAAGATCCTGGCAACCCCTCCACAGGAGGACGCACCCTCAGTG
GACATTGCCAACATCCGCATGCCCAGCCTGCCCAGCTACAAAGTTGGGGACAAGATAGCCACCCGCAA
GGCCTACGGGCAGGCACTGGCCAAGCTGGGCCATGCCAGTGACCGCATCATCGCCCTGGATGGGGACA
CCAAAAATTCCACCTTCTCGGAGATCTTCAAAAAGGAGCACCCGGACCGCTTCATCGAGTGCTACATT
GCCGAGCAGAACATGGTGAGCATCGCGGTGGGCTGTGCCACCCGCAACAGGACGGTGCCCTTCTGCAG
CACTTTTGCAGCCTTCTTCACGCGGGCCTTTGACCAGATTCGCATGGCCGCCATCTCCGAGAGCAACA
TCAACCTCTGCGGCTCCCACTGCGGCGTTTCCATCGGGGAAGACGGGCCCTCCCAGATGGCCCTAGAA
GATCTGGCTATGTTTCGGTCAGTCCCCACATCAACTGTCTTTTACCCAAGTGATGGCGTTGCTACAGA
GAAGGCAGTGGAACTAGCCGCCAATACAAAGGGTATCTGCTTCATCCGGACCAGCCGCCCAGAAAATG
CCATCATCTATAACAACAATGAGGACTTCCAGGTCGGACAAGCCAAGGTGGTCCTGAAGAGCAAAGAT
GACCAGGTGACCGTTATCGGGGCTGGGGTGACCCTGCACGAGGCCTTGGCCGCTGCCGAACTGCTGAA
GAAAGAAAAGATCAACATCCGCGTGCTGGACCCCTTCACCATCAAGCCCCTGGACAGAAAACTCATTC
TCGACAGCGCTCGTGCCACCAAGGGCAGGATCCTCACCGTGGAGGACCATTATTATGAAGGTGGCATT
GGTGAGGCTGTGTCCAGTGCAGTAGTGGGCGAGCCTGGCATCACTGTCACCCACCTGGCAGTTAACCG
GGTACCAAGAAGTGGGAAGCCAGCTGAGCTGCTGAAGATGTTTGGTATCGACAGGGATGCCATTGCAC
AAGCTGTGAGGGGCCTCATCACCAAGGCCCATCATCACCACCATCACTAGGCAGGTGCGGCCGCTCTC
GAGCACCACCACCACCACCACTGGAGATCCCGGCTGCT

| | | | |
|---|---|---|---|
| NOV2e, CG175387-04 | | | |
| Protein Sequence | SEQ ID NO:16 | 582 aa | MW at 63701.1 kD |

MAVLFFHTMRYKSQDPRNPHNDRFVLSKGHAAPILYAVWAEAGFLAEAELLNLRKISSDLDGHPVPKQ
AFTDVATGSLGQGLGAACGMAYTGKYFDKASYRVYCLLGDGELSEGSVWEAMAFASIYKLDNLVAILD
INRLGQSDPAPLQHQMDIYQKRCEAFGWHAIIVDGHSVEELCKAFGQAKHQPTAIIAKTFKGRGITGV
EDKESWHGKPLPKNMAEQIIQEIYSQIQSKKKILATPPQEDAPSVDIANIRNPSLPSYKVGDKIATRK
AYGQALAKLGHASDRIIALDGDTKNSTFSEIFKKEHPDRFIECYIAEQNMVSIAVGCATRNRTVPFCS
TFAAFFTRAFDQIRMAAISESNINLCGSHCGVSIGEDGPSQMALEDLAMFRSVPTSTVFYPSDGVATE
KAVELAANTKGICFIRTSRPENAIIYNNNEDFQVGQAKVVLKSKDDQVTVIGAGVTLHEALAAAELLK
KEKINIRVLDPFTIKPLDRKLILDSARATKGRILTVEDHYYEGGIGEAVSSAVVGEPGITVTHLAVNR
VPRSGKPAELLKMFGIDRDAIAQAVRGLITKAHHHHHH

[0417] A ClustalW comparison of the above protein sequences yields the following sequence alignment shown in Table B5.

TABLE B5
Comparison of the NOV2 protein sequences.

| | |
|---|---|
| NOV2a | —————MESYHKPDQQKLQALKDTANRLRISSIQATTAAGSGHPTSCCSAAEIMAVLFFHT |
| NOV2b | HHHHHHESYHKPDQQKLQALKDTANRLRISSIQATTAAGSGHPTSCCSAAEIMAVLFFHT |
| NOV2c | —PNSTMESYHKPDQQKLQALKDTANRLRISSIQATTAAGSGHPTSCCSAAEIMAVLFFHT |
| NOV2d | —PNSTMESYHKPDQQKLQALKDTANRLRISSIQATTAAGSGHPTSCCSAAEIMAVLFFHT |
| NOV2e | ————————————————————————————————————————————————————MAVLFFHT |
| NOV2a | MRYKSQDPRNPHNDRFVLSKGHAAPILYAVWAEAGFLAEAELLNLRKISSDLDGHPVPKQ |
| NOV2b | MRYKSQDPRNPHNDRFVLSKGHAAPILYAVWAEAGFLAEAELLNLRKISSDLDGHPVPKQ |
| NOV2c | MRYKSQDPRNPHNDRFVLSKGHAAPILYAVWAEAGFLAEAELLNLRKISSDLDGHPVPKQ |
| NOV2d | MRYKSQDPRNPHNDRFVLSKGHAAPILYAVWAEAGFLAEAELLNLRKISSDLDGHPVPKQ |
| NOV2e | MRYKSQDPRNPHNDRFVLSKGHAAPILYAVWAEAGFLAEAELLNLRKISSDLDGHPVPKQ |
| NOV2a | AFTDVATGSLGQGLGAACGMAYTGKYFDKASYRVYCLLGDGELSEGSVWEAMAFASIYKL |
| NOV2b | AFTDVATGSLGQGLGAACGMAYTGKYFDKASYRVYCLLGDGELSEGSVWEAMAFASIYKL |
| NOV2c | AFTDVATGSLGQGLGAACGMAYTGKYFDKASYRVYCLLGDGELSEGSVWEAMAFASIYKL |
| NOV2d | AFTDVATGSLGQGLGAACGMAYTGKYFDKASYRVYCLLGDGELSEGSVWEAMAFASIYKL |
| NOV2e | AFTDVATGSLGQGLGAACGMAYTGKYFDKASYRVYCLLGDGELSEGSVWEAMAFASIYKL |
| NOV2a | DNLVAILDINRLGQSDPAPLQHQMDIYQKRCEAFGWHAIIVDGHSVEELCKAFGQAKHQP |
| NOV2b | DNLVAILDINRLGQSDPAPLQHQMDIYQKRCEAFGWHAIIVDGHSVEELCKAFGQAKHQP |
| NOV2c | DNLVAILDINRLGQSDPAPLQHQMDIYQKRCEAFGWHAIIVDGHSVEELCKAFGQAKHQP |
| NOV2d | DNLVAILDINRLGQSDPAPLQHQMDIYQKRCEAFGWHAIIVDGHSVEELCKAFGQAKHQP |
| NOV2e | DNLVAILDINRLGQSDPAPLQHQMDIYQKRCEAFGWHAIIVDGHSVEELCKAFGQAKHQP |
| NOV2a | TAIIAKTFKGRGITGVEDKESWHGKPLPKNMAEQIIQEIYSQIQSKKKILATPPQEDAPS |
| NOV2b | TAIIAKTFKGRGITGVEDKESWHGKPLPKNMAEQIIQEIYSQIQSKKKILATPPQEDAPS |
| NOV2c | TAIIAKTFKGRGITGVEDKESWHGKPLPKNMAEQIIQEIYSQIQSKKKILATPPQEDAPS |
| NOV2d | TAIIAKTFKGRGITGVEDKESWHGKPLPKNMAEQIIQEIYSQIQSKKKILATPPQEDAPS |
| NOV2e | TAIIAKTFKGRGITGVEDKESWHGKPLPKNMAEQIIQEIYSQIQSKKKILATPPQEDAPS |
| NOV2a | VDIANIRMPSLPSYKVGDKIATRKAYGQALAKLGHASDRIIALDGDTKNSTFSEIFKKEH |
| NOV2b | VDIANIRMPSLPSYKVGDKIATRKAYGQALAKLGHASDRIIALDGDTKNSTFSEIFKKEH |
| NOV2c | VDIANIRMPSLPSYKVGDKIATRKAYGQALAKLGHASDRIIALDGDTKNSTFSEIFKKEH |
| NOV2d | VDIANIRMPSLPSYKVGDKIATRKAYGQALAKLGHASDRIIALDGDTKNSTFSEIFKKEH |
| NOV2e | VDIANIRMPSLPSYKVGDKIATRKAYGQALAKLGHASDRIIALDGDTKNSTFSEIFKKEH |
| NOV2a | PDRFIECYIAEQNNVSIAVGCATRNRTVPFCSTFAAFFTRAFDQIRMAAISESNINLCGS |
| NOV2b | PDRFIECYIAEQNMVSIAVGCATRNRTVPFCSTFAAFFTRAFDQIRMAAISESNINLCGS |
| NOV2c | PDRFIECYIAEQNMVSIAVGCATRNRTVPFCSTFAAFFTRAFDQIRMAAISESNINLCGS |
| NOV2d | PDRFIECYIAEQNMVSIAVGCATRNRTVPFCSTFAAFFTRAFDQIRMAAISESNINLCGS |
| NOV2e | PDRFIECYIAEQNMVSIAVGCATRNRTVPFCSTFAAFFTRAFDQIRMAAISESNINLCGS |
| NOV2a | HCGVSIGEDGPSQMALEDLAMFRSVPTSTVFYPSDGVATEKAVELAANTKGICFIRTSRP |
| NOV2b | HCGVSIGEDGPSQMALEDLAMFRSVPTSTVFYPSDGVATEKAVELAANTKGICFIRTSRP |
| NOV2c | HCGVSIGEDGPSQMALEDLANFRSVPTSTVFYPSDGVATEKAVELAANTKGICFIRTSRP |
| NOV2d | HCGVSIGEDGPSQMALEDLAMFRSVPTSTVFYPSDGVATEKAVELAANTKGICFIRTSRP |
| NOV2e | HCGVSIGEDGPSQMALEDLAMFRSVPTSTVFYPSDGVATEKAVELAANTKGICFIRTSRP |
| NOV2a | ENAIIYNNNEDFQVGQAKVVLKSKDDQVTVIGAGVTLHEALAAAELLKKEKINIRVLDPF |
| NOV2b | ENAIIYNNNEDFQVGQAKVVLKSKDDQVTVIGAGVTLHEALAAAELLKKEKINIRVLDPF |
| NOV2c | ENAIIYNNNEDFQVGQAKVVLKSKDDQVTVIGAGVTLHEALAAAELLKKEKINIRVLDPF |
| NOV2d | ENAIIYNNNEDFQVGQAKVVLKSKDDQVTVIGAGVTLHEALAAAELLKKEKINIRVLDPF |
| NOV2e | ENAIIYNNNEDFQVGQAKVVLKSKDDQVTVIGAGVTLHEALAAAELLKKEKINIRVLDPF |
| NOV2a | TIKPLDRKLILDSARATKGRILTVEDHYYEGGIGEAVSSAVVGEPGITVTHLAVNRVPRS |
| NOV2b | TIKPLDRKLILDSARATKGRILTVEDHYYEGGIGEAVSSAVVGEPGITVTHLAVNRVPRS |
| NOV2c | TIKPLDRKLILDSARATKGRILTVEDHYYEGGIGEAVSSAVVGEPGITVTHLAVNRVPRS |
| NOV2d | TIKPLDRKLILDSARATKGRILTVEDHYYEGGIGEAVSSAVVGEPGITVTHLAVNRVPRS |
| NOV2e | TIKPLDRKLILDSARATKGRILTVEDHYYEGGIGEAVSSAVVGEPGITVTHLAVNRVPRS |
| NOV2a | GKPAELLKMFGIDRDAIAQAVRGLITKA—————— |
| NOV2b | GKPAELLKMFGIDRDAIAQAVRGLITKA—————— |
| NOV2c | GKPAELLKMFGIDRDAIAQAVRGLITKA—————— |
| NOV2d | GKPAELLKMFGIDRDAIAQAVRGLITKA—————— |
| NOV2e | GKPAELLKMFGIDRDAIAQAVRGLITKAHHHHHH |
| NOV2a | (SEQ ID NO:8) |
| NOV2b | (SEQ ID NO:10) |
| NOV2c | (SEQ ID NO:12) |
| NOV2d | (SEQ ID NO:14) |
| NOV2e | (SEQ ID NO:16) |

[0418] Further analysis of the NOV2a protein yielded the following properties shown in Table B6.

TABLE B6
Protein Sequence Properties NOV2a

| SignalP | No Known Signal Sequence Predicted | | | |
|---|---|---|---|---|
| analysis: | | | | |
| PSORT II | PSG: a new signal peptide prediction method | | | |
| analysis: | N-region: length 11; pos. chg 2; neg. chg 2 | | | |
| | H-region: length 4; peak value −6.34 | | | |
| | PSG score: −10.74 | | | |
| | GvH: von Heijne's method for signal seq. recognition | | | |
| | GvH score (threshold: −2.1): −6.01 | | | |
| | possible cleavage site: between 41 and 42 | | | |
| | >>> Seems to have no N-terminal signal peptide | | | |
| | ALOM: Klein et al's method for TM region allocation | | | |
| | Init position for calculation: 1 | | | |
| | Tentative number of TMS(s) for the threshold 0.5: 0 | | | |
| | number of TMS(s) . . . fixed | | | |
| | PERIPHERAL Likelihood = 1.11 (at 503) | | | |
| | ALOM score: 1.11 (number of TMSs: 0) | | | |
| | MITDISC: discrimination of mitochondrial targeting seq | | | |
| | R content: | 0 | Hyd Moment(75): | 4.90 |
| | Hyd Moment(95): | 4.71 | G content: | 0 |
| | D/E content: | 2 | S/T content: | 1 |

```
Score: −7.08
Gavel: prediction of cleavage sites for mitochondrial preseq
cleavage site motif not found
NUCDISC: discrimination of nuclear localization signals
pat4: none
pat7: none
bipartite: none
content of basic residues: 11.4%
NLS Score: −0.47
KDEL: ER retention motif in the C-terminus: none
ER Membrane Retention Signals:
KKXX-like motif in the C-terminus: LITK
SKL: peroxisomal targeting signal in the C-terminus: none
PTS2: 2nd peroxisomal targeting signal: none
VAC: possible vacuolar targeting motif: none
RNA-binding motif: none
Actinin-type actin-binding motif:
type 1: none
type 2: none
NMYR: N-myristoylation pattern: none
Prenylation motif: none
memYQRL: transport motif from cell surface to Golgi: none
Tyrosines in the tail: none
Dileucine motif in the tail: none
checking 63 PROSITE DNA binding motifs: none
checking 71 PROSITE ribosomal protein motifs: none
checking 33 PROSITE prokaryotic DNA binding motifs: none
NNCN: Reinhardt's method for Cytoplasmic/Nuclear
discrimination
Prediction: cytoplasmic
Reliability: 76.7
COIL: Lupas's algorithm to detect coiled-coil regions
total: 0 residues
Final Results (k = 9/23):
60.9%: cytoplasmic
26.1%: nuclear
  4.3%: mitochondrial
  4.3%: vacuolar
  4.3%: peroxisomal
>> prediction for CG175387-01 is cyt (k = 23)
```

[0419] A search of the NOV2a protein against the Geneseq database, a proprietary database that contains sequences published in patents and patent publication, yielded several homologous proteins shown in Table B7.

TABLE B7
Geneseq Results for NOV2a

| | | NOV2a | Identities/ | |
|---|---|---|---|---|
| | | Residues/ | Similarities for | |
| Geneseq | Protein/Organism/Length | Match | the Matched | Expect |
| Identifier | [Patent #, Date] | Residues | Region | Value |
| ABB08374 | Mouse transkelotase-like enzyme | 1 . . . 622 | 590/622 (94%) | 0.0 |
| | amino acid sequence - Mus sp, 623 aa. | 1 . . . 622 | 610/622 (97%) | |
| | [WO200192310-A2, 06-DEC-2001] | | | |
| ABU53000 | Human metabolism-associated | 6 . . . 616 | 582/611 (95%) | 0.0 |
| | DKFZphtes3_17117 homologue #1 - | 1 . . . 611 | 600/611 (97%) | |
| | Homo sapiens, 611 aa. | | | |
| | [WO200112659-A2, 22-FEB-2001] | | | |
| AAE33377 | Human DME-3 protein - Homo | 6 . . . 616 | 416/614 (67%) | 0.0 |
| | sapiens, 738 aa. [WO200290521-A2, | 119 . . . 732 | 499/614 (80%) | |
| | 14-NOV-2002] | | | |
| ABU52999 | Human metabolism-associated | 6 . . . 616 | 415/614 (67%) | 0.0 |
| | protein from DKFZphtes3_17117 - | 7 . . . 620 | 498/614 (80%) | |
| | Homo sapiens, 626 aa. | | | |
| | [WO200112659-A2, 22-FEB-2001] | | | |
| ABB08373 | Human transkelotase-like enzyme | 6 . . . 616 | 415/614 (67%) | 0.0 |
| | amino acid sequence - Homo sapiens, | 6 . . . 619 | 498/614 (80%) | |
| | 625 aa. [WO200192310-A2, 06-DEC-2001] | | | |

[0420] In a BLAST search of public sequence databases, the NOV2a protein was found to have homology to the proteins shown in the BLASTP data in Table B8.

TABLE B8
Public BLASTP Results for NOV2a

| | | NOV2a | Identities/ | |
|---|---|---|---|---|
| Protein | | Residues/ | Similarities for | |
| Accession | | Match | the Matched | Expect |
| Number | Protein/Organism/Length | Residues | Portion | Value |
| P29401 | Transketolase (EC 2.2.1.1) (TK) - | 1 . . . 623 | 623/623 (100%) | 0.0 |
| | Homo sapiens (Human), 623 aa. | 1 . . . 623 | 623/623 (100%) | |
| A45050 | transketolase (EC 2.2.1.1) - | 1 . . . 623 | 619/623 (99%) | 0.0 |
| | human, 623 aa. | 1 . . . 623 | 621/623 (99%) | |
| P40142 | Transketolase (EC 2.2.1.1) (TK) | 1 . . . 622 | 590/622 (94%) | 0.0 |
| | (P68) - Mus musculus (Mouse), | 1 . . . 622 | 610/622 (97%) | |
| | 623 aa. | | | |
| P50137 | Transketolase (EC 2.2.1.1) (TK) - | 1 . . . 622 | 586/622 (94%) | 0.0 |
| | Rattus norvegicus (Rat), 623 aa. | 1 . . . 622 | 609/622 (97%) | |
| Q9ESA0 | Transketolase - Mus musculus | 65 . . . 622 | 529/558 (94%) | 0.0 |
| | (Mouse), 559 aa (fragment). | 1 . . . 558 | 548/558 (97%) | |

[0421] PFam analysis predicts that the NOV2a protein contains the domains shown in the Table B9.

TABLE B9
Domain Analysis of NOV2a

| | | Identities/ | |
|---|---|---|---|
| | | Similarities for | |
| | NOV2a | the Matched | Expect |
| Pfam Domain | Match Region | Region | Value |
| E1_dehydrog | 58 . . . 302 | 59/329 (18%) | 0.011 |
| | | 150/329 (46%) | |
| transketolase | 14 . . . 304 | 108/339 (32%) | 3.9e−159 |
| | | 290/339 (86%) | |
| transket_pyr | 314 . . . 479 | 53/188 (28%) | 1.3e−56 |
| | | 143/188 (76%) | |
| transketolase_C | 490 . . . 612 | 41/136 (30%) | 4.9e−34 |
| | | 105/136 (77%) | |

### EXAMPLE B3

### Transketolase Gene Variants and SNPs

[0422] Variant sequences are included in this application. A variant sequence can include a single nucleotide polymorphism (SNP). A SNP can, in some instances, be referred to as a “cSNP” to denote that the nucleotide sequence containing the SNP originates as a cDNA. A SNP can arise in several ways. For example, a SNP may be due to a substitution of one nucleotide for another at the polymorphic site. Such a substitution can be either a transition or a transversion. A SNP can also arise from a deletion of a nucleotide or an insertion of a nucleotide, relative to a reference allele. In this case, the polymorphic site is a site at which one allele bears a gap with respect to a particular nucleotide in another allele. SNPs occurring within genes may result in an alteration of the amino acid encoded by the gene at the position of the SNP. Intragenic SNPs may also be silent, however, in the case that a codon including a SNP encodes the same amino acid as a result of the redundancy of the genetic code. SNPs occurring outside the region of a gene, or in an intron within a gene, do not result in changes in any amino acid sequence of a protein but may result in altered regulation of the expression pattern for example, alteration in temporal expression, physiological response regulation, cell type expression regulation, intensity of expression, stability of transcribed message.

Method of novel SNP Identification:

[0423] SNPs are identified by analyzing sequence assemblies using CuraGen's proprietary SNPTool algorithm. SNPTool identifies variation in assemblies with the following criteria: SNPs are not analyzed within 10 base pairs on both ends of an alignment; Window size (number of bases in a view) is 10; The allowed number of mismatches in a window is 2; Minimum SNP base quality (PHRED score) is 23; Minimum number of changes to score an SNP is 2/assembly position. SNPTool analyzes the assembly and displays SNP positions, associated individual variant sequences in the assembly, the depth of the assembly at that given position, the putative assembly allele frequency, and the SNP sequence variation. Sequence traces are then selected and brought into view for manual validation. The consensus assembly sequence is imported into CuraTools along with variant sequence changes to identify potential amino acid changes resulting from the SNP sequence variation. Comprehensive SNP data analysis is then exported into the SNPCalling database.

[0424] Method of novel SNP Confirmation: SNPs are confirmed employing a validated method know as Pyrosequencing. Detailed protocols for Pyrosequencing can be found in: Alderborn et al. Determination of Single Nucleotide Polymorphisms by Real-time Pyrophosphate DNA Sequencing. (2000). Genome Research. 10, Issue 8, August. 1249-1265.

[0425] In brief, Pyrosequencing is a real time primer extension process of genotyping. This protocol takes double-stranded, biotinylated PCR products from genomic DNA samples and binds them to streptavidin beads. These beads are then denatured producing single stranded bound DNA. SNPs are characterized utilizing a technique based on an indirect bioluminometric assay of pyrophosphate (PPi) that is released from each dNTP upon DNA chain elongation. Following Klenow polymerase-mediated base incorporation, PPi is released and used as a substrate, together with adenosine 5′-phosphosulfate (APS), for ATP sulfurylase, which results in the formation of ATP. Subsequently, the ATP accomplishes the conversion of luciferin to its oxi-derivative by the action of luciferase. The ensuing light output becomes proportional to the number of added bases, up to about four bases. To allow processivity of the method dNTP excess is degraded by apyrase, which is also present in the starting reaction mixture, so that only dNTPs are added to the template during the sequencing. The process has been fully automated and adapted to a 96-well format, which allows rapid screening of large SNP panels.

Results

[0426] The DNA and protein sequences for the novel single nucleotide polymorphic variants of the transketolase-like gene of CuraGen Acc. No. CG175387-01 are reported in Table B10. Variants are reported individually but any combination of all or a select subset of variants are also included. In Table B10, the positions of the variant bases and the variant amino acid residues are underlined. In summary, there are 22 variants reported in Table B 10. Variant 13377687 is a G to A SNP at 134 bp of the nucleotide sequence that results in an Ala to Thr change at amino acid 19 of protein sequence, variant 13377688 is a C to T SNP at 287 bp of the nucleotide sequence that results in an Arg to Cys change at amino acid 70 of protein sequence, variant 13377684 is a G to T SNP at 566 bp of the nucleotide sequence that results in a Val to Leu change at amino acid 163 of protein sequence, variant 13377689 is an A to G SNP at 651 bp of the nucleotide sequence that results in an Asp to Gly change at amino acid 191 of protein sequence, variant 13380050 is an A to T SNP at 699 bp of the nucleotide sequence that results in a Glu to Val change at amino acid 207 of protein sequence, variant 13380051 is a T to C SNP at 741 bp of the nucleotide sequence that results in a Val to Ala change at amino acid 221 of protein sequence, variant 13377683 is an A to G SNP at 747 bp of the nucleotide sequence that results in a Glu to Gly change at amino acid 223 of protein sequence, variant 13377690 is an A to G SNP at 894 bp of the nucleotide sequence that results in a Gln to Arg change at amino acid 272 of protein sequence, variant 13377682 is a T to C SNP at 1253 bp of the nucleotide sequence that results in a Phe to Leu change at amino acid 392 of protein sequence, variant 13380092 is an A to G SNP at 1307 bp of the nucleotide sequence that results in an Ile to Val change at amino acid 410 of protein sequence, variant 13380073 is an A to G SNP at 1441 bp of the nucleotide sequence that results in no change in the protein sequence (silent), variant 13380072 is a C to T SNP at 1519 bp of the nucleotide sequence that results in no change in the protein sequence (silent), variant 13380093 is an A to G SNP at 1529 bp of the nucleotide sequence that results in an Asn to Asp change at amino acid 484 of protein sequence, variant 13380094 is a C to T SNP at 1550 bp of the nucleotide sequence that results in a Gln to Stop change at amino acid 491 of protein sequence, variant 13380095 is a T to C SNP at 1603 bp of the nucleotide sequence that results in no change in the protein sequence (silent), variant 13380052 is a G to T SNP at 1645 bp of the nucleotide sequence that results in no change in the protein sequence (silent), variant 13377691 is a T to C SNP at 1683 bp of the nucleotide sequence that results in a Phe to Ser change at amino acid 535 of protein sequence, variant 13380053 is a T to C SNP at 1783 bp of the nucleotide sequence that results in no change in the protein sequence (silent), variant 13377686 is a G to A SNP at 1802 bp of the nucleotide sequence that results in an Ala to Thr change at amino acid 575 of protein sequence, variant 13380055 is a C to T SNP at 1813 bp of the nucleotide sequence that results in no change in the protein sequence (silent), variant 13377685 is an A to G SNP at 1832 bp of the nucleotide sequence that results in a Thr to Ala change at amino acid 585 of protein sequence, and variant 13380056 is an A to G SNP at 1862 bp of the nucleotide sequence that results in a Ser to Gly change at amino acid 595 of protein sequence.

TABLE B10
Variants of nucleotide sequence of
Acc. No. CG175387-01 (SEQ ID NO: 7)

| | Nucleotides | | | Amino Acids | | |
|---|---|---|---|---|---|---|
| Variant | Position | Initial | Modified | Position | Initial | Modified |
| 13377687 | 134 | G | A | 19 | Ala | Thr |
| 13377688 | 287 | C | T | 70 | Arg | Cys |
| 13377684 | 566 | G | T | 163 | Val | Leu |
| 13377689 | 651 | A | G | 191 | Asp | Gly |
| 13380050 | 699 | A | T | 207 | Glu | Val |
| 13380051 | 741 | T | C | 221 | Val | Ala |
| 13377683 | 747 | A | G | 223 | Glu | Gly |
| 13377690 | 894 | A | G | 272 | Gln | Arg |
| 13377682 | 1253 | T | C | 392 | Phe | Leu |
| 13380092 | 1307 | A | G | 410 | Ile | Val |
| 13380073 | 1441 | A | G | 454 | Thr | Thr |
| 13380072 | 1519 | C | T | 480 | Ile | Ile |
| 13380093 | 1529 | A | G | 484 | Asn | Asp |
| 13380094 | 1550 | C | T | 491 | Gln | STOP |
| 13380095 | 1603 | T | C | 508 | Ala | Ala |
| 13380052 | 1645 | G | T | 522 | Leu | Leu |
| 13377691 | 1683 | T | C | 535 | Phe | Ser |
| 13380053 | 1783 | T | C | 568 | Ile | Ile |
| 13377686 | 1802 | G | A | 575 | Ala | Thr |
| 13380055 | 1813 | C | T | 578 | Gly | Gly |
| 13377685 | 1832 | A | G | 585 | Thr | Ala |
| 13380056 | 1862 | A | G | 595 | Ser | Gly |

[0427] TABLE B11
Variant Sequences

```
Table B11A1.
Nucleotide sequence of variant 13377687 NOV2a1n (underlined). G/A (SEQ ID NO:111)
      1 GGCACGAGGGCCTGTCGCCGCGGGAGCAGCCGCTATCTCTGTGTGTCCGCGTGTGCGCCCGGTCCCCGCCTGCCGCACCA
    81 TGGAGAGCTACCACAAGCCTGACCAGCAGAAGCTGCAGGCCTTGAAGGACACGACCAACCGCCTACGTATCAGCTCCATC
  161 CAGGCCACCACTGCGGCGGGCTCTGGCCACCCCACGTCATGCTGCAGCGCCGCAGAGATCATGGCTGTCCTCTTTTTCCA
  241 CACCATGCGCTACAAGTCCCAGGACCCCCGGAATCCGCACAATGACCGCTTTGTGCTCTCCAAGGGCCATGCAGCTCCCA
  321 TCCTCTACGCGGTCTGGGCTGAAGCTGGTTTCCTGGCCGAGGCGGAGCTGCTGAACCTGAGGAAGATCAGCTCCGACTTG
  401 GACGGGCACCCGGTCCCGAAACAAGCTTTCACCGACGTGGCCACTGGCTCCCTGGGCCAGGGCCTCGGGGCCGCTTGTGG
  481 GATGGCCTACACCGGCAAATACTTCGACAAGGCCAGCTACCGAGTCTATTGCTTGCTGGGAGATGGGGAGCTGTCAGAGG
  561 GCTCTGTATGGGAGGCCATGGCCTTCGCCAGCATCTATAAGCTGGACAACCTTGTGGCCATTCTAGACATCAATCGCCTG
  641 GGCCAGAGTGACCCGGCCCCGCTGCAGCACCAGATGGACATCTACCAGAAGCGGTGCGAGGCCTTCGGTTGGCATGCCAT
  721 CATCGTGGATGGACACAGCGTGGAGGAGCTGTGCAAGGCCTTTGGCCAGGCCAAGCACCAGCCAACAGCCATCATTGCCA
  801 AGACCTTCAAGGGCCGAGGGATCACGGGGGTAGAAGATAAGGAGTCTTGGCATGGGAAGCCCCTCCCCAAAAACATGGCT
  881 GAGCAGATCATCCAGGAGATCTACAGCCAGATCCAGAGCAAAAAGAAGATCCTGGCAACCCCTCCACAGGAGGACGCACC
  961 CTCAGTGGACATTGCCAACATCCGCATGCCCAGCCTGCCCAGCTACAAAGTTGGGGACAAGATAGCCACCCGCAAGGCCT
1041 ACGGGCAGGCACTGGCCAAGCTGGGCCATGCCAGTGACCGCATCATCGCCCTGGATGGGGACACCAAAAATTCCACCTTC
1121 TCGGAGATCTTCAAAAAGGAGCACCCGGACCGCTTCATCGAGTGCTACATTGCCGAGCAGAACATGGTGAGCATCGCGGT
1201 GGGCTGTGCCACCCGCAACAGGACGCTGCCCTTCTGCAGCACTTTTGCAGCCTTCTTCACGCGGGCCTTTGACCAGATTC
1281 GCATGGCCGCCATCTCCGAGAGCAACATCAACCTCTGCGGCTCCCACTGCGGCGTTTCCATCGGGGAAGACGGGCCCTCC
1361 CAGATGGCCCTAGAAGATCTGGCTATGTTTCGGTCAGTCCCCACATCAACTGTCTTTTACCCAAGTGATGGCGTTGCTAC
1441 AGAGAAGGCAGTGGAACTAGCCGCCAATACAAAGGGTATCTGCTTCATCCGGACCAGCCGCCCAGAAAATGCCATCATCT
1521 ATAACAACAATGAGGACTTCCAGGTCGGACAAGCCAAGGTGGTCCTGAAGAGCAAGGATGACCAGGTGACCGTTATCGGG
1601 GCTGGGGTGACCCTGCACGAGGCCTTGGCCGCTGCCGAACTGCTGAAGAAAGAAAAGATCAACATCCGCGTGCTGGACCC
1681 CTTCACCATCAAGCCCCTGGACAGAAAACTCATTCTCGACAGCGCTCGTGCCACCAAGGGCAGGATCCTCACCGTGGAGG
1761 ACCATTATTATGAAGGTGGCATTGGTGAGGCTGTGTCCAGTGCAGTAGTGGGCGAGCCTGGCATCACTGTCACCCACCTG
1841 GCAGTTAACCGGGTACCAAGAAGTGGGAAGCCAGCTGAGCTGCTGAAGATGTTTGGTATCGACAGGGATGCCATTGCACA
1921 AGCTGTGAGGGGCCTCATCACCAAGGCCTAGGGCGGGTATGAAGTGTGGGGCGGGGGTCTATACATTCCTGAGATTCTGG
2001 GAAAAGGTGCCAAAGATGTACTGAGAGGAGGGGTAAATATATGTTTTGAGAAAAATGAAAAAAAAAAAAAAAAAAAAA
Table B11A2.
Protein sequence of variant NOV2a1p (underlined). (SEQ ID NO:112)
      1 MESYHKPDQQKLQALKDTTNRLRISSIQATTAAGSGHPTSCCSAAEIMAVLFFHTMRYKSQDPRNPHNORFVLSKGHAAP
    81 ILYAVWAEAGFLAEAELLNLRKISSDLDGHPVPKQAFTDVATGSLGQGLGAACGMAYTGKYFDKASYRVYCLLGDGELSE
  161 GSVWEAMAFASIYKLDNLVAILDINRLGQSDPAPLQHQMDIYQKRCEAFGWHAIIVDGHSVEELCKAFGQAKHQPTAIIA
  241 KTFKGRGITGVEDKESWHGKPLPKNMAEQIIQEIYSOIQSKKKILATPPQEDAPSVDIANIRNPSLPSYKVGDKIATRKA
  321 YGQALAKLGHASDRIIALDGDTKNSTFSEIFKKEHPDRFIECYIAEQNMVSIAVGCATRNRTVPFCSTEAAFFTRAFDQI
  401 RMAAISESNINLCGSHCGVSIGEDGPSQMALEDLANFRSVPTSTVFYPSDGVATEKAVELAANTKGICFIRTSRPENAII
  481 YNNNEDFQVGQAKVVLKSKDDQVTVIGAGVTLHEALAAAELLKKEKINIRVLDPFTIKPLDRKLILDSARATKGRILTVE
  561 DHYYEGGIGEAVSSAVVGEPGITVTHLAVNRVPRSGKPAELLKMFGIDRDAIAQAVRGLITKA
Table B11A3. Alteration effect
Ala to Thr
Table B11B1.
Nucleotide sequence of variant 13377688 NOV2a2n (underlined). C/T (SEQ ID NO:113)
      1 GGCACGAGGGCCTGTCGCCGCGGGAGCAGCCGCTATCTCTGTGTGTCCGCGTGTGCGCCCGGTCCCCGCCTGCCGCACCA
    81 TGGAGAGCTACCACAAGCCTGACCAGCAGAAGCTGCAGGCCTTGAAGGACACGGCCAACCGCCTACGTATCAGCTCCATC
  161 CAGGCCACCACTGCGGCGGGCTCTGGCCACCCCACGTCATGCTGCAGCGCCGCAGAGATCATGGCTGTCCTCTTTTTCCA
  241 CACCATGCGCTACAAGTCCCAGGACCCCCGGAATCCGCACAATGACTGCTTTGTGCTCTCCAAGGGCCATGCAGCTCCCA
  321 TCCTCTACGCGGTCTGGGCTGAAGCTGGTTTCCTGGCCGAGGCGGAGCTGCTGAACCTGAGGAAGATCAGCTCCGACTTG
  401 GACGGGCACCCGGTCCCGAAACAAGCTTTCACCGACGTGGCCACTGGCTCCCTGGGCCAGGGCCTCGGGGCCGCTTGTGG
  481 GATGGCCTACACCGGCAAATACTTCGACAAGGCCAGCTACCGAGTCTATTGCTTGCTGGGAGATGGGGAGCTGTCAGAGG
  561 GCTCTGTATGGGAGGCCATGGCCTTCGCCAGCATCTATAAGCTGGACAACCTTGTGGCCATTCTAGACATCAATCGCCTG
  641 GGCCAGAGTGACCCGGCCCCGCTGCAGCACCAGATGGACATCTACCAGAAGCGGTGCGAGGCCTTCGGTTGGCATGCCAT
  721 CATCGTGGATGGACACAGCGTGGAGGAGCTGTGCAAGGCCTTTGGCCAGGCCAAGCACCAGCCAACAGCCATCATTGCCA
  801 AGACCTTCAAGGGCCGAGGGATCACGGGGGTAGAAGATAAGGAGTCTTCGCATGGGAAGCCCCTCCCCAAAAACATGGCT
  881 GAGCAGATCATCCAGGAGATCTACAGCCAGATCCAGAGCAAAAAGAAGATCCTGGCAACCCCTCCACAGGAGGACGCACC
  961 CTCAGTGGACATTGCCAACATCCGCATGCCCAGCCTGCCCAGCTACAAAGTTGGGGACAAGATAGCCACCCGCAAGGCCT
1041 ACGGGCAGGCACTGGCCAAGCTGGGCCATGCCAGTGACCGCATCATCGCCCTGGATGGGGACACCAAAAATTCCACCTTC
1121 TCGGAGATCTTCAAAAAGGAGCACCCGGACCGCTTCATCGAGTGCTACATTGCCGAGCAGAACATGGTGAGCATCGCGGT
1201 GGGCTGTGCCACCCGCAACAGGACGGTGCCCTTCTGCAGCACTTTTGCAGCCTTCTTCACGCGGGCCTTTGACCAGATTC
1281 GCATGGCCGCCATCTCCGAGAGCAACATCAACCTCTGCGGCTCCCACTGCGGCGTTTCCATCGGGGAAGACGGGCCCTCC
1361 CAGATCGCCCTAGAAGATCTGGCTATGTTTCGGTCAGTCCCCACATCAACTGTCTTTTACCCAAGTGATGGCGTTGCTAC
1441 AGAGAAGGCAGTGGAACTAGCCGCCAATACAAAGGGTATCTGCTTCATCCGGACCAGCCGCCCAGAAAATGCCATCATCT
1521 ATAACAACAATGAGGACTTCCAGGTCGGACAAGCCAAGGTGGTCCTGAAGAGCAAGGATGACCAGGTGACCGTTATCGGG
1601 GCTGGGGTGACCCTGCACGAGGCCTTGGCCGCTGCCGAACTGCTGAAGAAAGAAAAGATCAACATCCGCGTGCTGGACCC
1681 CTTCACCATCAAGCCCCTGGACAGAAAACTCATTCTCGACAGCGCTCGTGCCACCAAGGGCAGGATCCTCACCGTGGAGG
1761 ACCATTATTATGAAGGTGGCATTGGTGAGGCTGTGTCCAGTGCAGTAGTCGGCGAGCCTGGCATCACTGTCACCCACCTG
1841 GCAGTTAACCGGGTACCAAGAAGTGGGAAGCCAGCTGAGCTGCTGAAGATGTTTGGTATCGACAGGGATGCCATTGCACA
1921 AGCTGTGAGGGGCCTCATCACCAAGGCCTAGGGCGGGTATGAAGTGTGGGGCGGGGGTCTATACATTCCTGAGATTCTGG
2001 GAAAGGTGCTCAAAGATGTACTGAGAGGAGGGGTAAATATATGTTTTGAGAAAAATAAAAAAAAAAAAAAAAAAAAAA
Table B11B2. Protein sequence of variant NOV2a2p (underlined). (SEQ ID NO:114)
      1 MESYHKPDQQKLQALKDTANRLRISSIQATTAAGSGHPTSCCSAAEIMAVLFFHTMRYKSQDPRNPHNDCFVLSKGHAAP
    81 ILYAVWAEAGFLAEAELLNLRKISSDLDGHPVPKQAFTDVATGSLGQGLGAACGMAYTGKYFDKASYRVYCLLGDGELSE
  161 GSVWEAMAFASIYKLDNLVAILDINRLGQSDPAPLQHQMDIYQKRCEAFGWHAIIVDGHSVEELCKAFGQAKHQPTAIIA
  241 KTFKGRGITGVEDKESWHGKPLPKNMAEQIIQEIYSQIQSKKKILATPPQEDAPSVDIANIRMPSLPSYKVGDKIATRKA
  321 YGQALAKLGHASDRIIALDGDTKNSTFSEIFKKEHPDRFIECYIAEQNNVSIAVGCATRNRTVPFCSTFAAFFTRAFDQI
  401 RMAAISESNINLCGSHCGVSIGEDGPSQMALEDLAMFRSVPTSTVFYPSDGVATEKAVELAANTKGICFIRTSRPENAII
  481 YNNNEDFQVGQAKVVLKSKDDQVTVIGAGVTLHEALAAAELLKKEKINIRVLDPFTIKPLDRKLILDSARATKGRILTVE
  561 DHYYEGGIGEAVSSAVVGEPGITVTHLAVNRVPRSGKPAELLKMFGIDRDAIAQAVRGLITKA
Table B11B3. Alteration effect
Arg to Cys
Table B11C1.
Nucleotide sequence of variant 13377684 NOV2a3n (underlined). G/T (SEQ ID NO:115)
      1 GGCACGAGGGCCTGTCGCCGCGGGAGCAGCCGCTATCTCTGTGTGTCCGCGTGTGCGCCCGGTCCCCGCCTGCCGCACCA
    81 TGGAGAGCTACCACAAGCCTGACCAGCAGAAGCTGCAGGCCTTGAAGGACACGGCCAACCGCCTACGTATCAGCTCCATC
  161 CAGGCCACCACTGCGGCGGGCTCTGGCCACCCCACGTCATGCTGCAGCGCCGCAGAGATCATGGCTGTCCTCTTTTTCCA
  241 CACCATGCGCTACAAGTCCCAGGACCCCCGGAATCCGCACAATGACCGCTTTGTGCTCTCCAAGGGCCATGCAGCTCCCA
  321 TCCTCTACGCGGTCTGGGCTGAAGCTGGTTTCCTGGCCGAGGCGGAGCTGCTGAACCTGAGGAAGATCAGCTCCGACTTG
  401 GACGGGCACCCGGTCCCGAAACAAGCTTTCACCGACGTGGCCACTGGCTCCCTGGGCCAGGGCCTCGGGGCCGCTTGTGG
  481 GATGGCCTACACCGGCAAATACTTCGACAAGGCCAGCTACCGAGTCTATTGCTTGCTGGGAGATGGCGAGCTGTCAGAGG
  561 GCTCTTTATGGGAGGCCATGGCCTTCGCCAGCATCTATAAGCTGGACAACCTTGTGGCCATTCTAGACATCAATCGCCTG
  641 GGCCAGAGTGACCCGGCCCCGCTGCAGCACCAGATGGACATCTACCAGAAGCGGTGCGAGGCCTTCGGTTGGCATGCCAT
  721 CATCGTGGATGGACACAGCGTGGAGGAGCTGTGCAAGGCCTTTGGCCAGGCCAAGCACCAGCCAACAGCCATCATTGCCA
  801 AGACCTTCAAGGGCCGAGGGATCACGGGGGTAGAAGATAAGGAGTCTTGGCATGGGAAGCCCCTCCCCAAAAACATGGCT
  881 GAGCAGATCATCCAGGAGATCTACAGCCAGATCCAGAGCAAAAAGAAGATCCTGGCAACCCCTCCACAGGAGGACGCACC
  961 CTCAGTGGACATTGCCAACATCCGCATGCCCAGCCTGCCCAGCTACAAAGTTGGGGACAAGATAGCCACCCGCAAGGCCT
1041 ACGGGCAGGCACTGGCCAAGCTGGGCCATGCCAGTGACCGCATCATCGCCCTGGATGGGGACACCAAAAATTCCACCTTC
1121 TCGGAGATCTTCAAAAAGGAGCACCCGGACCGCTTCATCGAGTGCTACATTGCCGAGCAGAACATGGTGAGCATCGCGGT
1201 GGGCTGTGCCACCCGCAACAGGACGGTGCCCTTCTGCAGCACTTTTGCAGCCTTCTTCACGCGGGCCTTTGACCAGATTC
1281 GCATGGCCGCCATCTCCGAGAGCAACATCAACCTCTGCGGCTCCCACTGCGGCGTTTCCATCGGGGAAGACGGGCCCTCC
1361 CAGATGGCCCTAGAAGATCTGGCTATGTTTCGGTCAGTCCCCACATCAACTGTCTTTTACCCAAGTGATGGCGTTGCTAC
1441 AGAGAAGGCAGTGGAACTAGCCGCCAATACAAAGGGTATCTGCTTCATCCGGACCAGCCGCCCAGAAAATGCCATCATCT
1521 ATAACAACAATGAGGACTTCCAGGTCGGACAAGCCAAGGTGGTCCTGAAGAGCAAGGATGACCAGGTGACCGTTATCGGG
1601 GCTGGGGTGACCCTGCACGAGGCCTTGGCCGCTGCCGAACTGCTGAAGAAAGAAAAGATCAACATCCGCGTGCTGGACCC
1681 CTTCACCATCAAGCCCCTGGACAGAAAACTCATTCTCGACAGCGCTCGTGCCACCAAGGGCAGGATCCTCACCGTGGAGG
1761 ACCATTATTATGAAGGTGGCATTGGTGAGGCTGTGTCCAGTGCAGTAGTGGGCGAGCCTGGCATCACTGTCACCCACCTG
1841 GCAGTTAACCGGGTACCAAGAAGTGGGAAGCCAGCTGAGCTGCTGAAGATGTTTGGTATCGACAGGGATGCCATTGCACA
1921 AGCTGTGAGGGGCCTCATCACCAAGGCCTAGGGCGGGTATGAAGTGTGGGGCGGGGGTCTATACATTCCTGAGATTCTGG
2001 GAAAGGTGCTCAAAGATGTACTGAGAGGAGGGGTAAATATATGTTTTGAGAAAAATGAAAAAAAAAAAAAAAAAAAAA
Table B11C2. Protein sequence of variant NOV2a3p (underlined). (SEQ ID NO:116)
      1 MESYHKPDQQKLQALKDTANRLRISSIQATTAAGSGHPTSCCSAAEIMAVLFFHTMRYKSQDPRNPRNDRFVLSKGHAAP
    81 ILYAVWAEAGFLAEAELLNLRKISSDLDGHPVPKQAFTDVATGSLGQGLGAACGMAYTGKYFDKASYRVYCLLGDGELSE
  161 GSLWEAMAFASIYKLDNLVAILDINRLGQSDPAPLQHQMDIYQKRCEAFGWHAIIVDGHSVEELCKAFGQAKHQPTAIIA
  241 KTFKGRGITGVEDKESWHGKPLPKNMAEQIIQEIYSQIQSKKKILATPPQEDAPSVDIANIRNPSLPSYKVGDKIATRKA
  321 YGQALAKLGHASDRIIALDGDTKNSTFSEIFKKEHPDRFIECYIAEQNNVSIAVGCATRNRTVPFCSTFAAFFTRAFDQI
  401 RMAAISESNINLCGSHCGVSIGEDGPSQMALEDLANPRSVPTSTVFYPSDGVATEKAVELAANTKGICFIRTSRPENAII
  481 YNNNEDFQVGQAKVVLKSKDDQVTVIGAGVTLHEALAAAELLKKEKINIRVLDPFTIKPLDRKLILDSARATKGRILTVE
  561 DHYYEGGIGEAVSSAVVGEPGITVTHLAVNRVPRSGKPAELLKMFGIDRDAIAQAVRGLITKA
Table B11C3. Alteration effect
Val to Leu
Table B11D1.
Nucleotide sequence of variant 13377689 NOV2a4n (underlined). A/G (SEQ ID NO:117)
      1 GGCACGAGGGCCTGTCGCCGCGGGAGCAGCCGCTATCTCTGTGTGTCCGCGTGTGCGCCCGGTCCCCGCCTGCCGCACCA
    81 TGGAGAGCTACCACAAGCCTGACCAGCAGAAGCTGCAGGCCTTGAAGGACACGGCCAACCGCCTACGTATCAGCTCCATC
  161 CAGGCCACCACTGCGGCGGGCTCTGGCCACCCCACGTCATGCTGCAGCGCCGCAGAGATCATGGCTGTCCTCTTTTTCCA
  241 CACCATGCGCTACAAGTCCCAGGACCCCCGGAATCCGCACAATGACCGCTTTGTGCTCTCCAAGGGCCATGCAGCTCCCA
  321 TCCTCTACGCGGTCTGGGCTGAAGCTGGTTTCCTGGCCGAGGCGGAGCTGCTGAACCTGAGGAAGATCAGCTCCGACTTG
  401 GACGGGCACCCGGTCCCGAAACAAGCTTTCACCGACGTGGCCACTGGCTCCCTGGGCCAGGGCCTCGGGGCCGCTTGTGG
  481 GATGGCCTACACCGGCAAATACTTCGACAAGGCCAGCTACCGAGTCTATTGCTTGCTGGGAGATGGGGAGCTGTCAGAGG
  561 GCTCTGTATGGGAGGCCATGGCCTTCGCCAGCATCTATAAGCTGGACAACCTTGTGGCCATTCTAGACATCAATCGCCTG
  641 GGCCAGAGTGGCCCGGCCCCGCTGCAGCACCAGATGGACATCTACCAGAAGCGGTGCGAGGCCTTCGGTTGGCATGCCAT
  721 CATCGTGGATGGACACAGCGTGGAGGAGCTGTGCAAGGCCTTTGGCCAGGCCAAGCACCAGCCAACAGCCATCATTGCCA
  801 AGACCTTCAAGGGCCGAGGGATCACGGGGGTAGAAGATAAGGAGTCTTGGCATGGGAAGCCCCTCCCCAAAAACATGGCT
  881 GAGCAGATCATCCAGGAGATCTACAGCCAGATCCAGAGCAAAAAGAAGATCCTGGCAACCCCTCCACAGGAGGACGCACC
  961 CTCAGTGGACATTGCCAACATCCGCATGCCCAGCCTGCCCAGCTACAAAGTTGGGGACAAGATAGCCACCCGCAAGGCCT
1041 ACGGGCAGGCACTGGCCAAGCTGGGCCATGCCAGTGACCGCATCATCGCCCTGGATGGGGACACCAAAAATTCCACCTTC
1121 TCGGAGATCTTCAAAAAGGAGCACCCGGACCGCTTCATCGAGTGCTACATTGCCGAGCAGAACATGGTGAGCATCGCGGT
1201 GGGCTGTGCCACCCGCAACAGGACGGTGCCCTTCTGCAGCACTTTTGCAGCCTTCTTCACGCGGGCCTTTGACCAGATTC
1281 GCATGGCCGCCATCTCCGAGAGCAACATCAACCTCTGCGGCTCCCACTGCGGCGTTTCCATCGGGGAAGACGGGCCCTCC
1361 CAGATGGCCCTAGAAGATCTGGCTATGTTTCGGTCAGTCCCCACATCAACTGTCTTTTACCCAAGTGATGGCGTTGCTAC
1441 AGAGAAGGCAGTGGAACTAGCCGCCAATACAAAGGGTATCTGCTTCATCCGGACCAGCCGCCCAGAAAATGCCATCATCT
1521 ATAACAACAATGAGGACTTCCAGGTCGGACAAGCCAAGGTGGTCCTGAAGAGCAAGGATGACCAGGTGACCGTTATCGGG
1601 GCTGGGGTGACCCTGCACGAGGCCTTGGCCGCTGCCGAACTGCTGAAGAAAGAAAAGATCAACATCCGCGTGCTGGACCC
1681 CTTCACCATCAACCCCCTGGACAGAAAACTCATTCTCGACAGCGCTCGTGCCACCAAGGGCAGGATCCTCACCGTGGAGG
1761 ACCATTATTATCAAGGTGGCATTGGTGAGGCTGTGTCCAGTGCAGTAGTGGGCGAGCCTGGCATCACTGTCACCCACCTG
1841 GCAGTTAACCGGGTACCAAGAAGTGGGAAGCCAGCTGAGCTGCTGAAGATGTTTGGTATCGACAGGGATGCCATTGCACA
1921 AGCTGTGAGGGGCCTCATCACCAAGGCCTAGGGCGGGTATGAAGTGTGGGGCGGGGGTCTATACATTCCTGAGATTCTGG
2001 GAAAGGTGCTCAAAGATGTACTGAGAGGAGGGGTAAATATATGTTTTGAGAAAAATGAAAAAAAAAAAAAAAAAAAAA
Table B11D2. Protein sequence of variant NOV2a4p (underlined). (SEQ ID NO:118)
      1 MESYHKPDQQKLQALKDTANRLRISSIQATTAAGSGHPTSCCSAAEIMAVLFFHTMRYKSQDPRNPHNDRFVLSKGHAAP
    81 ILYAVWAEAGFLAEAELLNLRKISSDLDGHPVPKQAFTDVATGSLGQGLGAACGMAYTGKYPDKASYRVYCLLGDGELSE
  161 GSVWEAMAFASIYKLDNLVAILDINRLGQSGPAPLQHQMDIYQKRCEAFGWHAIIVDGHSVEELCKAFGQAKHQPTAIIA
  241 KTFKGRGITGVEDKESWHGKPLPKNMAEQIIQEIYSQIQSKKKILATPPQEDAPSVDIANIRMPSLPSYKVGDKIATRKA
  321 YGQALAKLGHASDRIIALDGDTKNSTFSEIFKKEHPDRFIECYIAEQNMVSIAVGCATRNRTVPFCSTFAAFFTRAFDQI
  401 RMAAISESNINLCGSHCGVSIGEDGPSQMALEDLAMFRSVPTSTVFYPSDGVATEKAVELAANTKGICFIRTSRPENAII
  481 YNNNEDFQVGQAKVVLKSKDDQVTVIGAGVTLHEALAAAELLKKEKINIRVLDPFIIKPLDRKLILDSARATKGRILTVE
  561 DHYYEGGIGEAVSSAVVGEPGITVTHLAVNRVPRSGKPAELLKMFGIDRDAIAQAVRGLITKA
Table B11D3. Alteration effect
Asp to Gly
Table B11E1.
Nucleotide sequence of variant 13380050 NOV2a5n (underlined). A/T (SEQ ID NO:119)
      1 GGCACGAGGGCCTGTCGCCGCGGGAGCAGCCGCTATCTCTGTGTGTCCGCGTGTGCGCCCGGTCCCCGCCTGCCGCACCA
    81 TGGAGAGCTACCACAAGCCTGACCAGCAGAAGCTGCAGGCCTTGAAGGACACGGCCAACCGCCTACGTATCAGCTCCATC
  161 CAGGCCACCACTGCGGCGGGCTCTGGCCACCCCACGTCATGCTGCAGCGCCGCAGAGATCATGGCTGTCCTCTTTTTCCA
  241 CACCATGCGCTACAAGTCCCAGGACCCCCGGAATCCCCACAATGACCGCTTTGTGCTCTCCAAGGGCCATGCAGCTCCCA
  321 TCCTCTACGCGGTCTGGGCTGAAGCTGGTTTCCTGGCCGAGGCGGAGCTGCTCAACCTGAGGAAGATCAGCTCCGACTTG
  401 GACGGGCACCCGGTCCCGAAACAAGCTTTCACCGACGTGGCCACTGCCTCCCTGGGCCAGGGCCTCGGGGCCGCTTGTGG
  481 GATGGCCTACACCGGCAAATACTTCGACAAGGCCAGCTACCGAGTCTATTGCTTGCTGGGAGATGGGGAGCTGTCAGAGG
  561 GCTCTGTATGGGAGGCCATGGCCTTCGCCAGCATCTATAAGCTGGACAACCTTGTGGCCATTCTAGACATCAATCGCCTG
  641 GGCCAGAGTGACCCGGCCCCGCTGCAGCACCAGATGGACATCTACCAGAAGCGGTGCGTGGCCTTCGGTTGGCATGCCAT
  721 CATCGTGGATGGACACAGCGTGGAGGAGCTGTGCAAGGCCTTTGGCCAGGCCAAGCACCAGCCAACAGCCATCATTGCCA
  801 AGACCTTCAAGGGCCGAGGGATCACGGGGGTAGAAGATAAGGAGTCTTGGCATGGGAAGCCCCTCCCCAAAAACATGGCT
  881 CAGCAGATCATCCAGGAGATCTACAGCCAGATCCAGAGCAAAAAGAAGATCCTGGCAACCCCTCCACAGGAGGACGCACC
  961 CTCAGTGGACATTGCCAACATCCGCATGCCCAGCCTGCCCAGCTACAAAGTTGGGGACAAGATAGCCACCCGCAAGGCCT
1041 ACGGGCAGGCACTGGCCAAGCTGGGCCATGCCAGTGACCGCATCATCGCCCTGGATGGGGACACCAAAAATTCCACCTTC
1121 TCGGAGATCTTCAAAAAGGAGCACCCGGACCGCTTCATCGAGTGCTACATTGCCGAGCAGAACATGGTGAGCATCGCGGT
1201 GGGCTGTGCCACCCGCAACAGGACGGTGCCCTTCTGCAGCACTTTTGCAGCCTTCTTCACGCGGGCCTTTGACCAGATTC
1281 GCATGGCCGCCATCTCCGAGAGCAACATCAACCTCTGCGGCTCCCACTGCGGCGTTTCCATCGGGGAAGACGGGCCCTCC
1361 CAGATGGCCCTAGAAGATCTGGCTATGTTTCGGTCAGTCCCCACATCAACTGTCTTTTACCCAAGTGATGGCGTTGCTAC
1441 AGAGAAGGCAGTGGAACTAGCCGCCAATACAAAGGGTATCTGCTTCATCCGGACCAGCCGCCCAGAAAATGCCATCATCT
1521 ATAACAACAATGAGGACTTCCAGGTCGGACAAGCCAAGGTGGTCCTGAAGAGCAAGGATGACCAGGTGACCGTTATCGGG
1601 GCTGGGGTGACCCTGCACGACGCCTTGGCCGCTGCCGAACTGCTGAAGAAAGAAAAGATCAACATCCGCGTGCTGGACCC
1681 CTTCACCATCAAGCCCCTGGACAGAAAACTCATTCTCGACAGCGCTCGTGCCACCAAGGGCAGGATCCTCACCGTGGAGG
1761 ACCATTATTATGAAGGTGGCATTGGTGAGGCTGTGTCCAGTGCAGTAGTGGGCGAGCCTGGCATCACTGTCACCCACCTG
1841 GCAGTTAACCGGGTACCAAGAAGTGGGAAGCCAGCTGAGCTGCTGAAGATGTTTGGTATCGACAGGGATGCCATTGCACA
1921 AGCTGTGAGGGGCCTCATCACCAAGGCCTAGGGCGGGTATGAAGTGTGGGGCGGGGGTCTATACATTCCTGAGATTCTGG
2001 GAAAGGTGCTCAAAGATGTACTGAGAGGAGGGGTAAATATATGTTTTGAGAAAAATGAAAAAAAAAAAAAAAAAAAAA
Table B11E2. Protein sequence of variant NOV2a5p (underlined). (SEQ ID NO:120)
      1 MESYHKPDQQKLQALKDTANRLRISSIQATTAAGSGHPTSCCSAAEIMAVLFFHTMRYKSQDPRNPHNDRFVLSKGHAAP
    81 ILYAVWAEAGFLAEAELLNLRKISSDLDGHPVPKQAFTDVATGSLGQGLGAACGMAYTGKYFDKASYRVYCLLGDGELSE
  161 GSVWEAMAFASIYKLDNLVAILDINRLGQSDPAPLQHQMDIYQKRCVAFGWHAIIVDGHSVEELCKAFGQAKHQPTAIIA
  241 KTFKGRGITGVEDKESWHGKPLPKNMAEQIIQEIYSQIQSKKKILATPPQEDAPSVDIANIRMPSLPSYKVGDKIATRKA
  321 YGQALAKLGHASDRIIALDGDTKNSTFSEIFKKEHPDRFIECYIAEQNMVSIAVGCATRNRTVPFCSTFAAFFTRAFDQI
  401 RMAAISESNINLCGSHCGVSIGEDGPSQMALEDLAMFRSVPTSTVFYPSDGVATEKAVELAANTKGICFIRTSRPENAII
  481 YNNNEDFQVGQAKVVLKSKDDQVTVIGAGVTLHEALAAAELLKKEKINIRVLDPFTIKPLDRKLILDSARATKGRILTVE
  561 DHYYEGGIGEAVSSAVVGEPGITVTHLAVNRVPRSGKPAELLKMFGIDRDAIAQAVRGLITKA
Table B11E3. Alteration effect
Glu to Val
Table B11F1.
Nucleotide sequence of variant 13380051 NOV2a6n (underlined). T/C (SEQ ID NO:121)
      1 GGCACGAGGGCCTGTCGCCGCGGGAGCAGCCGCTATCTCTGTGTGTCCGCGTGTGCGCCCGGTCCCCGCCTGCCGCACCA
    81 TGGAGAGCTACCACAAGCCTGACCAGCAGAAGCTGCAGGCCTTGAAGGACACGGCCAACCGCCTACGTATCAGCTCCATC
  161 CAGGCCACCACTGCGGCGGGCTCTGGCCACCCCACGTCATGCTGCAGCGCCGCAGAGATCATGGCTGTCCTCTTTTTCCA
  241 CACCATGCGCTACAAGTCCCAGGACCCCCGGAATCCGCACAATGACCGCTTTGTGCTCTCCAAGGGCCATGCAGCTCCCA
  321 TCCTCTACGCGCTCTGGGCTGAAGCTGGTTTCCTGGCCGAGGCGGAGCTGCTGAACGTGAGGAAGATCAGCTCCGACTTG
  401 GACGGGCACCCGGTCCCGAAACAAGCTTTCACCGACGTGGCCACTGGCTCCCTCGGCCAGGGCCTCGGGGCCGCTTGTGG
  481 GATGGCCTACACCGGCAAATACTTCGACAAGGCCAGCTACCGAGTCTATTGCTTGCTGGGAGATGGGGAGCTGTCAGAGG
  561 GCTCTGTATGGGAGGCCATGGCCTTCGCCAGCATCTATAAGCTGGACAACCTTGTGGCCATTCTAGACATCAATCGCCTG
  641 GGCCAGAGTGACCCGGCCCCGCTGCAGCACCAGATGGACATCTACCAGAAGCGGTGCGAGGCCTTCGGTTGGCATGCCAT
  721 CATCGTGGATGGACACAGCGCGGAGGAGCTGTGCAAGGCCTTTGGCCAGGCCAAGCACCAGCCAACAGCCATCATTGCCA
  801 AGACCTTCAAGGGCCGAGGGATCACGGGGGTAGAAGATAAGGAGTCTTGGCATGGGAAGCCCCTCCCCAAAAACATGGCT
  881 GAGCAGATCATCCAGGAGATCTACAGCCAGATCCAGAGCAAAAAGAAGATCCTGGCAACCCCTCCACAGGAGGACGCACC
  961 CTCAGTGGACATTGCCAACATCCGCATGCCCAGCCTGCCCAGCTACAAAGTTGGGGACAACATAGCCACCCGCAAGGCCT
1041 ACGGGCAGGCACTGGCCAAGCTGGGCCATGCCAGTGACCGCATCATCGCCCTGGATGGGGACACCAAAAATTCCACCTTC
1121 TCGGAGATCTTCAAAAAGGAGCACCCGGACCGCTTCATCGAGTGCTACATTGCCGAGCAGAACATGGTGAGCATCGCGGT
1201 GGGCTGTGCCACCCGCAACAGGACGGTGCCCTTCTGCAGCACTTTTGCAGCCTTCTTCACGCGGGCCTTTGACCAGATTC
1281 GCATGGCCGCCATCTCCGAGAGCAACATCAACCTCTGCGGCTCCCACTGCGGCGTTTCCATCGGGGAAGACGGGCCCTCC
1361 CAGATGGCCCTAGAAGATCTGGCTATGTTTCGGTCAGTCCCCACATCAACTCTCTTTTACCCAAGTGATGGCGTTGCTAC
1441 AGAGAAGGCAGTGGAACTAGCCGCCAATACAAAGGGTATCTGCTTCATCCGGACCAGCCGCCCAGAAAATGCCATCATCT
1521 ATAACAACAATGAGGACTTCCAGGTCGGACAAGCCAAGGTGGTCCTGAAGAGCAAGGATGACCAGGTGACCGTTATCGGG
1601 GCTGGGGTGACCCTGCACGAGGCCTTGGCCGCTGCCGAACTGCTGAAGAAAGAAAAGATCAACATCCGCGTGCTGGACCC
1681 CTTCACCATCAAGCCCCTGGACAGAAAACTCATTCTCGACAGCGCTCGTGCCACCAAGGGCAGGATCCTCACCGTGGAGG
1761 ACCATTATTATGAAGGTGGCATTGGTGAGGCTGTGTCCAGTGCAGTAGTGGGCGAGCCTGGCATCACTGTCACCCACCTG
1841 GCAGTTAACCGGGTACCAAGAAGTGGGAAGCCAGCTGAGCTGCTGAAGATGTTTGGTATCGACAGGGATGCCATTGCACA
1921 AGCTGTGAGGGGCCTCATCACCAAGGCCTAGGGCGGGTATGAAGTGTGGGGCGGGGGTCTATACATTCCTGAGATTCTGG
2001 GAAAGGTGCTCAAAGATGTACTGAGAGGAGGGGTAAATATATGTTTTGAGAAAAATGAAAAAAAAAAAAAAAAAAAAA
Table B11F2. Protein sequence of variant NOV2a6p (underlined). (SEQ ID NO:122)
      1 MESYHKPDQQKLQALKDTANRLRISSIQATTAAGSGHPTSCCSAAEIMAVLFFHTMRYKSQDPRNPHNDRFVLSKGHAAP
    81 ILYAVWAEAGFLAEAELLNLRKISSDLDGHPVPKQAFTDVATGSLGQGLGAACGMAYTGKYFDKASYRVYCLLGDGELSE
  161 GSVWEAMAFASIYKLDNLVAILDINRLGQSDPAPLQHQMDIYQKRCEAFGWHAIIVDGHSAEELCKAFGQAKHQPTAIIA
  241 KTFKGRGITGVEDKESWHGKPLPKNMAEQIIQEIYSQIQSKKKILATPPQEDAPSVDIANIRMPSLPSYKVGDKIATRKA
  321 YGQALAKLGHASDRIIALDGDTKNSTFSEIFKKEHPDRFIECYIAEQNMVSIAVGCATRNRTVPFCSTFAAFFTRAFDQI
  401 RMAAISESNINLCGSHCGVSIGEDGPSQMALEDLAMFRSVPTSTVFYPSDGVATEKAVELAANTKGICFIRTSRPENAII
  481 YNNNEDFQVGQAKVVLKSKDDQVTVIGAGVTLHEALAAAELLKKEKINIRVLDPFTIKPLDRKLILDSARATKCRILTVE
  561 DHYYEGCIGEAVSSAVVGEPGITVTHLAVNRVPRSGKPAELLKMFGIDRDAIAQAVRGLITKA
Table B11F3. Alteration effect
Val to Ala
Table B11G1.
Nucleotide sequence of variant 13377683 NOV2a7n (underlined). A/G (SEQ ID NO:123)
      1 GGCACGAGGGCCTGTCGCCGCGGGAGCAGCCGCTATCTCTGTGTGTCCGCGTGTGCGCCCGGTCCCCGCCTGCCGCACCA
    81 TGGAGAGCTACCACAAGCCTGACCAGCAGAAGCTGCAGGCCTTGAAGGACACGGCCAACCGCCTACGTATCAGCTCCATC
  161 CAGGCCACCACTGCGGCGGGCTCTGGCCACCCCACGTCATGCTGCAGCGCCGCAGAGATCATGGCTGTCCTCTTTTTCCA
  241 CACCATGCGCTACAAGTCCCAGGACCCCCGGAATCCGCACAATGACCGCTTTGTGCTCTCCAAGGGCCATGCAGCTCCCA
  321 TCCTCTACGCGGTCTGGGCTGAAGCTGGTTTCCTGCCCGAGGCGGAGCTGCTGAACCTGAGGAAGATCAGCTCCGACTTG
  401 GACGGGCACCCGGTCCCGAAACAAGCTTTCACCGACGTGGCCACTGGCTCCCTGGGCCAGGGCCTCGGGGCCGCTTGTGG
  481 GATGGCCTACACCGGCAAATACTTCGACAAGGCCAGCTACCGAGTCTATTGCTTGCTGGGAGATGGGGAGCTGTCAGAGG
  561 GCTCTGTATGGGAGGCCATGGCCTTCGCCAGCATCTATAAGCTGGACAACCTTGTGGCCATTCTAGACATCAATCGCCTG
  641 GGCCAGAGTGACCCGGCCCCGCTGCAGCACCAGATGGACATCTACCAGAAGCGGTGCGAGGCCTTCGGTTGGCATGCCAT
  721 CATCGTGGATGGACACAGCGTGGAGGGGCTGTGCAAGGCCTTTGGCCAGGCCAAGCACCAGCCAACAGCCATCATTGCCA
  801 AGACCTTCAAGGGCCGAGGGATCACGGGGGTAGAAGATAAGGAGTCTTGGCATGGGAAGCCCCTCCCCAAAAACATGGCT
  881 GAGCAGATCATCCAGGAGATCTACAGCCAGATCCAGAGCAAAAAGAAGATCCTGGCAACCCCTCCACAGGAGGACGCACC
  961 CTCAGTGGACATTGCCAACATCCGCATGCCCAGCCTGCCCAGCTACAAAGTTGGGGACAAGATAGCCACCCGCAAGGCCT
1041 ACGGGCAGGCACTGGCCAAGCTGGGCCATGCCAGTGACCGCATCATCGCCCTGGATGGGGACACCAAAAATTCCACCTTC
1121 TCGGAGATCTTCAAAAAGGAGCACCCGGACCGCTTCATCGAGTGCTACATTGCCGAGCAGAACATGGTGAGCATCGCGGT
1201 GGGCTGTGCCACCCGCAACAGGACGGTGCCCTTCTGCAGCACTTTTGCAGCCTTCTTCACGCGGGCCTTTGACCAGATTC
1281 GCATGGCCGCCATCTCCGAGAGCAACATCAACCTCTGCGGCTCCCACTGCGGCGTTTCCATCGGGGAAGACGGGCCCTCC
1361 CAGATGGCCCTAGAAGATCTGGCTATGTTTCGGTCAGTCCCCACATCAACTGTCTTTTACCCAAGTGATGGCGTTGCTAC
1441 AGAGAAGGCAGTGGAACTAGCCGCCAATACAAAGGGTATCTGCTTCATCCGGACCAGCCGCCCAGAAAATGCCATCATCT
1521 ATAACAACAATGAGGACTTCCAGGTCGGACAAGCCAAGGTGGTCCTGAAGAGCAAGGATGACCAGGTGACCGTTATCGGG
1601 GCTGGGGTGACCCTGCACGAGGCCTTGGCCGCTGCCGAACTGCTGAAGAAAGAAAAGATCAACATCCGCGTGCTGGACCC
1681 CTTCACCATCAAGCCCCTGGACAGAAAACTCATTCTCGACAGCGCTCGTGCCACCAAGGGCAGGATCCTCACCGTGGAGG
1761 ACCATTATTATGAAGGTGGCATTGGTGAGGCTGTGTCCAGTGCAGTAGTGGGCGAGCCTGGCATCACTGTCACCCACCTG
1841 GCAGTTAACCGGGTACCAAGAAGTGGGAAGCCAGCTGAGCTGCTGAAGATGTTTGGTATCGACAGGGATGCCATTGCACA
1921 AGCTGTGAGGGGCCTCATCACCAAGGCCTAGGGCGGGTATGAAGTGTGGGGCGGGGGTCTATACATTCCTGAGATTCTGG
2001 GAAAGGTGCTCAAAGATGTACTGAGAGGAGGGGTAAATATATGTTTTGAGAAAAATGAAAAAAAAAAAAAAAAAAAAA
Table B11G2. Protein sequence of variant NOV2a7p (underlined). (SEQ ID NO:124)
      1 MESYHKPDQQKLQALKDTANRLRISSIQATTAAGSGHPTSCCSAAEIMAVLFFHTMRYKSQDPRNPHNDRFVLSKGHAAP
    81 ILYAVWAEAGFLAEAELLNLRKISSDLDGHPVPKQAFTDVATGSLGQGLGAACGMAYTGKYFDKASYRVYCLLGDGELSE
  161 GSVWEAMAFASIYKLDNLVAILDINRLGQSDPAPLQHQMDIYQKRCEAFGWHAIIVDGHSVEGLCKAFGQAKHQPTAIIA
  241 KTFKGRGITGVEDKESWHGKPLPKNMAEQIIQEIYSQIQSKKKILATPPQEDAPSVDIANIRNPSLPSYKVGDKIATRKA
  321 YGQALAKLGHASDRIIALDGDTKNSTFSEIFKKEHPDRFIECYIAEQNNVSIAVGCATRNRTVPFCSTFAAFFTRAFDQI
  401 RMAAISESNINLCGSHCGVSIGEDGPSQMALEDLANFRSVPTSTVFYPSDGVATEKAVELAANTKGICFIRTSRPENAII
  481 YNNNEDFQVGQAKVVLKSKDDQVTVIGAGVTLHEALAAAELLKKEKINIRVLDPFTIKPLDRKLILDSARATKGRILTVE
  561 DHYYEGGIGEAVSSAVVGEPGITVTHLAVNRVPRSGKPAELLKMFGIDRDAIAQAVRGLITKA
Table B11G3. Alteration effect
Glu to Gly
Table B11H1.
Nucleotide sequence of variant 13377690 NOV2a8n (underlined). A/G (SEQ ID NO:125)
      1 GGCACGAGGGCCTGTCGCCGCGGGAGCAGCCGCTATCTCTGTGTGTCCGCGTGTGCGCCCGGTCCCCGCCTGCCGCACCA
    81 TGGAGAGCTACCACAAGCCTGACCAGCAGAAGCTGCAGGCCTTGAAGGACACGGCCAACCGCCTACGTATCAGCTCCATC
  161 CAGGCCACCACTGCGGCGGGCTCTGGCCACCCCACGTCATGCTGCAGCGCCGCAGAGATCATGGCTGTCCTCTTTTTCCA
  241 CACCATGCGCTACAAGTCCCAGGACCCCCGGAATCCGCACAATGACCGCTTTGTGCTCTCCAAGGGCCATGCAGCTCCCA
  321 TCcTCTACGCGGTCTGGGCTGAAGCTGGTTTCCTGGCCGAGGCGGAGCTGCTGAACCTGAGGAAGATCAGCTCCGACTTG
  401 GACGGGCACCCGGTCCCGAAACAAGCTTTCACCGACGTGGCCACTGGCTCCCTGGGCCAGGGCCTCGGGGCCGCTTGTGG
  481 GATGGCCTACACCGGCAAATACTTCGACAAGGCCAGCTACCGAGTCTATTGCTTGCTGGGAGATGGGGAGCTGTCAGAGG
  561 GCTCTGTATGGGAGGCCATGGCCTTCGCCAGCATCTATAAGCTGGACAACCTTGTGGCCATTCTAGACATCAATCGCCTG
  641 GGCCAGAGTGACCCGGCCCCGCTGCAGCACCAGATGGACATCTACCAGAAGCGGTGCGAGGCCTTCGGTTGGCATGCCAT
  721 CATCGTGGATGGACACAGCGTGGAGGAGCTGTGCAAGGCCTTTGGCCAGGCCAAGCACCAGCCAACAGCCATCATTGCCA
  801 AGACCTTCAAGGGCCGAGGGATCACGGGGGTAGAAGATAAGGAGTCTTGGCATGGGAAGCCCCTCCCCAAAAACATGGCT
  881 GAGCAGATCATCCGGGAGATCTACAGCCAGATCCAGAGCAAAAAGAAGATCCTGGCAACCCCTCCACAGGAGGACGCACC
  961 CTCAGTGGACATTGCCAACATCCGCATGCCCAGCCTGCCCAGCTACAAAGTTGGGGACAAGATAGCCACCCGCAAGGCCT
1041 ACGGGCAGGCACTGGCCAAGCTGGGCCATGCCAGTGACCGCATCATCGCCCTGGATGGGGACACCAAAAATTCCACCTTC
1121 TCGGAGATCTTCAAAAAGGAGCACCCGGACCGCTTCATCGAGTGCTACATTGCCGAGCAGAACATGGTGAGCATCGCGGT
1201 GGGCTGTGCCACCCGCAACAGGACGGTGCCCTTCTGCAGCACTTTTGCAGCCTTCTTCACGCGGGCCTTTGACCAGATTC
1281 GCATGGCCGCCATCTCCGAGAGCAACATCAACCTCTGCGGCTCCCACTGCGGCGTTTCCATCGGGGAAGACGGGCCCTCC
1361 CAGATGGCCCTAGAAGATCTGGCTATGTTTCGGTCAGTCCCCACATCAACTGTCTTTTACCCAAGTGATGGCGTTGCTAC
1441 AGAGAAGGCAGTGGAACTAGCCGCCAATACAAAGGGTATCTGCTTCATCCGGACCAGCCGCCCAGAAAATGCCATCATCT
1521 ATAACAACAATGAGGACTTCCAGGTCGGACAAGCCAAGGTGGTCCTGAAGAGCAAGGATGACCAGGTGACCGTTATCGGG
1601 GCTGGGGTGACCCTGCACGAGGCCTTGGCCGCTGCCGAACTGCTGAAGAAAGAAAAGATCAACATCCGCGTGCTGGACCC
1681 CTTCACCATCAAGCCCCTGGACAGAAAACTCATTCTCGACAGCGCTCGTGCCACCAAGGGCAGGATCCTCACCGTGGAGG
1761 ACCATTATTATGAAGGTGGCATTGGTGAGGCTGTGTCCAGTGCAGTAGTGGGCGAGCCTGGCATCACTGTCACCCACCTG
1841 GCAGTTAACCGGGTACCAAGAAGTGGGAAGCCAGCTGAGCTGCTGAAGATGTTTGGTATCGACAGGGATGCCATTGCACA
1921 AGCTGTGAGGGGCCTCATCACCAAGGCCTAGGGCGGGTATGAAGTGTGGGGCGGGGGTCTATACATTCCTGAGATTCTGG
2001 GAAAGGTGCTCAAAGATGTACTGAGAGGAGGGGThATATATGTTTTGAGAAAAATGAAAAAAAAAAAAAAAAAAAAAA
Table B11H2. Protein sequence of variant NOV2a8p (underlined). (SEQ ID NO:126)
      1 MESYHKPDQQKLQALKDTANRLRISSIQATTAAGSGHPTSCCSAAEIMAVLFFHTMRYKSQDPRNPHNDRFVLSKGHAAP
    81 ILYAVWAEAGFLAEAELLNLRKISSDLDGHPVPKQAFTDVATGSLGQGLGAACGMAYTGKYFDKASYRVYCLLGDGELSE
  161 GSVWEAMAFASIYKLDNLVAILDINRLGQSDPAPLQHQMDIYQKRCEAFGWHAIIVDGHSVEELCKAFGQAKHQPTAIIA
  241 KTFKGRGITGVEDKESWHGKPLPKNMAEQIIREIYSQIQSKKKILATPPQEDAPSVDIANIRMPSLPSYKVGDKIATRKA
  321 YGQALAKLGHASDRIIALDGDTKNSTFSEIFKKEHPDRFIECYIAEQNMVSIAVGCATRNRTVPFCSTFAAFFTRAFDQI
  401 RMAAISESNINLCGSHCGVSIGEDGPSQMALEDLANFRSVPTSTVFYPSDGVATEKAVELAANTKGICFIRTSRPENAII
  481 YNNNEOFQVGQAKVVLKSKDDQVTVIGAGVTLHEALAAAELLKKEKINIRVLDPFTIKPLDRKLILDSARATKGRILTVE
  561 DHYYEGGIGEAVSSAVVGEPGITVTHLAVMRVPRSGKPAELLKMFGIDRDAIAQAVRGLITKA
Table B11H3. Alteration effect
Gln to Arg
Table B11I1.
Nucleotide sequence of variant 13377682 NOV2a9n (underlined). T/C (SEQ ID NO:127)
      1 GGCACGAGGGCCTGTCGCCGCGGGAGCAGCCGCTATCTCTGTGTGTCCGCGTGTGCGCCCGGTCCCCGCCTGCCGCACCA
    81 TGGAGAGCTACCACAAGCCTGACCAGCAGAAGCTGCAGGCCTTGAAGGACACGGCCAACCGCCTACGTATCAGCTCCATC
  161 CAGGCCACCACTGCGGCGGGCTCTGGCCACCCCACGTCATGCTGCAGCGCCGCAGAGATCATGGCTGTCCTCTTTTTCCA
  241 CACCATGCGCTACAAGTCCCAGGACCCCCGGAATCCGCACAATGACCGCTTTGTGCTCTCCAAGGGCCATGCAGCTCCCA
  321 TCCTCTACGCGGTCTGGGCTGAAGCTGGTTTCCTGGCCGAGGCGGAGCTGCTGAACCTGAGGAAGATCAGCTCCGACTTG
  401 GACGGGCACCCGGTCCCGAAACAAGCTTTCACCGACGTGGCCACTGGCTCCCTGGGCCAGGGCCTCGGGGCCGCTTGTGG
  481 GATGGCCTACACCGGCAAATACTTCGACAAGGCCAGCTACCGAGTCTATTGCTTGCTGGGAGATGGGGAGCTGTCAGAGG
  561 GCTCTGTATGGGAGGCCATGGCCTTCGCCAGCATCTATAAGCTGGACAACCTTGTGGCCATTCTAGACATCAATCGCCTG
  641 GGCCAGAGTGACCCGGCCCCGCTGCAGCACCAGATGGACATCTACCAGAAGCGGTGCGAGGCCTTCGGTTGGCATGCCAT
  721 CATCGTGGATGGACACAGCGTGGAGGAGCTGTGCAAGGCCTTTGGCCAGGCCAAGCACCAGCCAACAGCCATCATTGCCA
  801 AGACCTTCAAGGGCCGAGGGATCACGGGGGTAGAAGATAAGGAGTCTTGGCATGGGAAGCCCCTCCCCAAAAACATGGCT
  881 GAGCAGATCATCCAGGAGATCTACAGCCAGATCCAGAGCAAAAAGAAGATCCTGGCAACCCCTCCACAGGAGGACGCACC
  961 CTCAGTGGACATTGCCAACATCCGCATGCCCAGCCTGCCCAGCTACAAAGTTGGGGACAAGATAGCCACCCGCAAGGCCT
1041 ACGGGCAGGCACTGGCCAAGCTGGGCCATGCCAGTGACCGCATCATCGCCCTGGATGGGGACACCAAAAATTCCACCTTC
1121 TCGGAGATCTTCAAAAAGGAGCACCCGGACCGCTTCATCGAGTGCTACATTGCCGAGCAGAACATGGTGAGCATCGCGGT
1201 GGGCTGTGCCACCCGCAACAGGACGGTGCCCTTCTGCAGCACTTTTGCAGCCCTCTTCACGCGGGCCTTTGACCAGATTC
1281 GCATGGCCGCCATCTCCGAGAGCAACATCAACCTCTGCGGCTCCCACTGCGGCGTTTCCATCGGGGAAGACGGGCCCTCC
1361 CAGATGGCCCTAGAAGATCTGGCTATGTTTCGGTCAGTCCCCACATCAACTGTCTTTTACCCAAGTGATGGCGTTGCTAC
1441 AGAGAAGGCAGTGGAACTAGCCGCCAATACAAAGGGTATCTGCTTCATCCGGACCAGCCGCCCAGAAAATGCCATCATCT
1521 ATAACAACAATGAGGACTTCCAGGTCGGACAAGCCAAGGTGGTCCTGAAGAGCAAGGATGACCAGGTGACCGTTATCGGG
1601 GCTGGGGTGACCCTGCACGAGGCCTTGGCCGCTGCCGAACTGCTGAAGAAAGAAAAGATCAACATCCGCGTGCTGGACCC
1681 CTTCACCATCAAGCCCCTGGACAGAAAACTCATTCTCGACAGCGCTCGTGCCACCAAGGGCAGGATCCTCACCGTGGAGG
1761 ACCATTATTATGAAGGTGGCATTGGTGAGGCTGTGTCCAGTGCAGTAGTGGGCGAGCCTGGCATCACTGTCACCCACCTG
1841 GCAGTTAACCGGGTACCAAGAAGTGGGAAGCCAGCTGAGCTGCTGAAGATGTTTGGTATCGACAGGGATGCCATTGCACA
1921 AGCTGTGAGGGGCCTCATCACCAAGGCCTAGCGCGGGTATGAAGTGTGGGGCGGGGGTCTATACATTCCTGAGATTCTGG
2001 GAAAGGTGCTCAAAGATGTACTGAGAGGAGGGGTAAATATATGTTTTGAGAAAAATGAAAAAAAAAAAAAAAAAAAAA
Table B11I2. Protein sequence of variant NOV2a9p (underlined). (SEQ ID NO:128)
      1 MESYHKPDQQKLQALKDTANRLRISSIQATTAAGSGHPTSCCSAAEIMAVLFFHTMRYKSQDPRNPHNDRFVLSKGHAAP
    81 ILYAVWAEAGFLAEAELLNLRKISSDLDGHPVPKQAFTDVATGSLGQGLGAACGMAYTGKYFDKASYRVYCLLGDGELSE
  161 GSVWEAMAFASIYKLDNLVAILDINRLGQSDPAPLQHQMDIYQKRCEAFGWHAIIVDGHSVEELCKAFGQAKHQPTAIIA
  241 KTFKGRGITGVEDKESWHGKPLPKNMAEQIIQEIYSQIQSKKKILATPPOEDAPSVDIANIRMPSLPSYKVGDKIATRKA
  321 YGQALAKLGHASDRIIALDGDTKNSTFSEIFKKEHPDRFIECYIAEQNMVSIAVGCATRNRTVPPCSTFAALFTRAFDQI
  401 RMAAISESNINLCGSHCGVSIGEDGPSQMALEDLANFRSVPTSTVFYPSDGVATEKAVELAANTKGICFIRTSRPENAII
  481 YNNNEDFQVGQAKVVLKSKDDQVTVIGAGVTLHEALAAAELLKKEKINIRVLDPFTIKPLDRKLILDSARATKGRILTVE
  561 DHYYEGGIGEAVSSAVVGEPGITVTHLAVNRVPRSGKPAELLKMFGIDRDAIAQAVRGLITKA
Table B11I3. Alteration effect
Phe to Leu
Table B11J1.
Nucleotide sequence of variant 13380092 NOV2a10n (underlined). A/G (SEQ ID NO:129)
      1 GGCACGAGGGCCTGTCGCCGCGGGAGCAGCCGCTATCTCTGTGTGTCCGCGTGTGCGCCCGGTCCCCGCCTGCCGCACCA
    81 TGGAGAGCTACCACAAGCCTGACCAGCAGAAGCTGCAGGCCTTGAAGGACACGGCCAACCGCCTACGTATCAGCTCCATC
  161 CAGGCCACCACTGCGGCGGGCTCTGGCCACCCCACGTCATGCTGCAGCGCCGCAGAGATCATGGCTGTCCTCTTTTTCCA
  241 CACCATGCGCTACAAGTCCCAGGACCCCCGGAATCCGCACAATGACCGCTTTGTGCTCTCCAAGGGCCATGCAGCTCCCA
  321 TCCTCTACGCGCTCTGGGCTGAAGCTGGTTTCCTGGCCGAGGCGGAGCTGCTGAACCTGAGGAAGATCAGCTCCGACTTG
  401 GACGGGCACCCGGTCCCGAAACAAGCTTTCACCGACGTGGCCACTGGCTCCCTGGGCCAGGGCCTCGGGGCCGCTTGTGG
  481 GATGGCCTACACCGGCAAATACTTCGACAAGGCCAGCTACCGAGTCTATTGCTTGCTGGGAGATGGGGAGCTGTCAGAGG
  561 GCTCTGTATGGGAGGCCATGGCCTTCGCCAGCATCTATAAGCTGGACAACCTTGTGGCCATTCTAGACATCAATCGCCTG
  641 GGCCAGAGTGACCCGGCCCCGCTGCAGCACCAGATGGACATCTACCAGAAGCGGTGCGAGGCCTTCGGTTGGCATGCCAT
  721 CATCGTGGATGGACACAGCGTGGAGGAGCTGTGCAAGGCCTTTGGCCAGGCCAAGCACCAGCCAACAGCCATCATTGCCA
  801 AGACCTTCAAGGGCCGAGGGATCACGGGGGTAGAAGATAAGGAGTCTTGGCATGGGAAGCCCCTCCCCAAAAACATGGCT
  881 GAGCAGATCATCCAGGAGATCTACAGCCAGATCCAGAGCAAAAAGAAGATCCTGGCAACCCCTCCACAGGAGGACGCACC
  961 CTCAGTGGACATTGCCAACATCCGCATGCCCAGCCTGCCCAGCTACAAAGTTGGGGACAAGATAGCCACCCGCAAGGCCT
1041 ACGGGCAGGCACTGGCCAAGCTGGGCCATGCCAGTGACCGCATCATCGCCCTGGATGGGGACACCAAAAATTCCACCTTC
1121 TCGGAGATCTTCAAAAAGGAGCACCCGGACCGCTTCATCGAGTGCTACATTGCCGAGCAGAACATGGTGAGCATCGCGGT
1201 GGGCTGTGCCACCCGCAACAGGACGGTGCCCTTCTGCAGCACTTTTGCAGCCTTCTTCACGCGGGCCTTTGACCAGATTC
1281 GCATGGCCGCCATCTCCGAGAGCAACGTCAACCTCTGCGGCTCCCACTGCGGCGTTTCCATCGGGGAAGACGGGCCCTCC
1361 CAGATGGCCCTAGAAGATCTGGCTATGTTTCGGTCAGTCCCCACATCAACTGTCTTTTACCCAAGTGATGGCGTTGCTAC
1441 AGAGAAGGCAGTGGAACTAGCCGCCAATACAAAGGGTATCTGCTTCATCCGGACCAGCCGCCCAGAAAATGCCATCATCT
1521 ATAACAACAATGAGGACTTCCAGGTCGGACAAGCCAAGGTGGTCCTGAAGAGCAAGGATGACCAGGTGACCGTTATCGGG
1601 GCTGGGGTGACCCTGCACGAGGCCTTGGCCGCTGCCGAACTGCTGAAGAAAGAAAAGATCAACATCCGCGTCCTGGACCC
1681 CTTCACCATCAAGCCCCTGGACAGAAAACTCATTCTCGACAGCGCTCGTGCCACCAAGGGCAGGATCCTCACCGTGGAGG
1761 ACCATTATTATGAAGGTGGCATTGGTGAGGCTGTGTCCAGTGCAGTAGTGGGCGAGCCTGGCATCACTGTCACCCACCTG
1841 GCAGTTAACCGGGTACCAAGAAGTGGGAAGCCAGCTGAGCTGCTGAAGATGTTTGGTATCGACAGGGATGCCATTGCACA
1921 AGCTGTCAGGGGCCTCATCACCAAGGCCTAGGGCGGGTATGAAGTGTGGGGCGGGGGTCTATACATTCCTGAGATTCTGG
2001 GAAAGGTGCTCAAAGATGTACTGAGAGGAGGGGTAAATATATGTTTTGAGAAAAATGAAAAAAAAAAAAAAAAAAAAA
Table B11J2. Protein sequence of variant NOV2a10p (underlined). (SEQ ID NO:130)
      1 MESYHKPDQQKLQALKDTANRLRISSIQATTAAGSGHPTSCCSAAEIMAVLFFHTMRYKSQDPRNPHNDRFVLSKGHAAP
    81 ILYAVWAEAGFLAEAELLNLRKISSDLDGHPVPKQAFTDVATGSLGOGLGAACGMAYTGKYFDKASYRVYCLLGDGELSE
  161 GSVWEANAFASIYKLDNLVAILDINRLGQSDPAPLQHQMDIYQKRCEAFGWHAIIVDGHSVEELCKAFGQAKHQPTAIIA
  241 KTFKGRGITGVEDKESWHGKPLPKNMAEQIIQEIYSQIQSKKKILATPPQEDAPSVDIANIRMPSLPSYKVGDKIATRKA
  321 YGQALAKLGHASDRIIALDGDTKNSTFSBIFKKEHPDRFIECYIAEQNMVSIAVGCATRNRTVPFCSTFAAFFTRAFDQI
  401 RMAAISESNVNLCGSHCGVSIGEDGPSQMALEDLANFRSVPTSTVFYPSDGVATEKAVELAANTKGICFIRTSRPENAII
  481 YNNNEDFQVGQAKVVLKSKDDQVTVIGAGVTLHEALAAAELLKKEKINIRVLDPFTIKPLDRKLILDSARATKGRILTVE
  561 DHYYEGGIGEAVSSAVVGEPGITVTHLAVNRVPRSGKPAELLKMFGIDRDAIAQAVRGLITKA
Table B11J3. Alteration effect
Ile to Val
Table B11K1.
Nucleotide sequence of variant 13380073 NOV2a11n (underlined). A/G (SEQ ID NO:131)
      1 GGCACGAGGGCCTGTCGCCGCGGGAGCAGCCGCTATCTCTGTGTGTCCGCGTGTGCGCCCGGTCCCCGCCTGCCGCACCA
    81 TGGAGAGCTACCACAAGCCTGACCAGCAGAAGCTGCAGGCCTTGAAGGACACGGCCAACCGCCTACGTATCAGCTCCATC
  161 CAGGCCACCACTGCGGCGGGCTCTGGCCACCCCACGTCATGCTGCAGCGCCGCAGAGATCATGGCTGTCCTCTTTTTCCA
  241 CACCATGCGCTACAAGTCCCAGGACCCCCGGAATCCGCACAATGACCGCTTTGTGCTCTCCAAGGGCCATGCAGCTCCCA
  321 TCCTCTACGCGGTCTGGGCTGAAGCTGGTTTCCTGGCCGAGGCGGAGCTGCTGAACCTGAGGAAGATCAGCTCCGACTTG
  401 GACGGGCACCCGGTCCCGAAACAAGCTTTCACCGACGTGGCCACTGGCTCCCTGGGCCAGGGCCTCGGGGCCGCTTGTGG
  481 GATGGCCTACACCGGCAAATACTTCGACAAGGCCAGCTACCGAGTCTATTGCTTGCTGGGAGATGGGGAGCTGTCAGAGG
  561 GCTCTGTATGGGAGGCCATGGCCTTCGCCAGCATCTATAAGCTGGACAACCTTGTGGCCATTCTAGACATCAATCGCCTG
  641 GGCCAGAGTGACCCGGCCCCGCTGCAGCACCAGATGGACATCTACCAGAAGCGGTGCGAGGCCTTCGGTTGGCATGCCAT
  721 CATCGTGGATGGACACAGCGTGGAGGAGCTGTGCAAGGCCTTTGGCCAGGCCAAGCACCAGCCAACAGCCATCATTGCcA
  801 AGACCTTCAAGGGCCGAGGGATCACGGGGGTAGAAGATAAGGAGTCTTGGCATGGGAAGCCCCTCCCCAAAAACATGGCT
  881 GAGCAGATCATCCAGGAGATCTACAGCCAGATCCAGAGCAAAAAGAAGATCCTGGCAACCCCTCCACAGGAGGACGCACC
  961 CTCAGTGGACATTGCCAACATCCGCATGCCCAGCCTGCCCAGCTACAAAGTTGGGGACAAGATAGCCACCCGCAAGGCCT
1041 ACGGGCAGGCACTGGCCAAGCTGGGCCATGCCAGTGACCGCATCATCGCCCTGGATGGGGACACCAAAAATTCCACCTTC
1121 TCGGAGATCTTCAAAAAGGAGCACCCGGACCGCTTCATCGAGTGCTACATTGCCGAGCAGAACATGGTGAGCATCGCGGT
1201 GGGCTGTGCCACCCGCAACAGGACGGTGCCCTTCTGCAGCACTTTTCCAGCCTTCTTCACGCGGGCCTTTGACCAGATTC
1281 GCATGGCCGCCATCTCCGAGAGCAACATCAACCTCTGCGGCTCCCACTGCGGCGTTTCCATCGGGGAAGACGGGCCCTCC
1361 CAGATGGCCCTAGAAGATCTGGCTATGTTTCGGTCAGTCCCCACATCAACTGTCTTTTACCCAAGTGATGGCGTTGCTAC
1441 GGAGAAGGCAGTGGAACTAGCCGCCAATACAAAGGGTATCTGCTTCATCCGGACCAGCCGCCCAGAAAATGCCATCATCT
1521 ATAACAACAATGAGGACTTCCAGGTCGGACAAGCCAAGGTGGTCCTGAAGAGCAAGGATGACCAGGTGACCGTTATCGGG
1601 GCTGGGGTGACCCTGCACGAGGCCTTGGCCGCTGCCGAACTGCTGAAGAAAGAAAAGATCAACATCCGCGTGCTGGACCC
1681 CTTCACCATCAAGCCCCTGCACAGAAAACTCATTCTCGACAGCGCTCGTGCCACCAAGGGCAGGATCCTCACCGTGGAGG
1761 ACCATTATTATGAAGGTGGCATTGGTGAGGCTGTGTCCAGTGCAGTAGTGGGCGAGCCTGGCATCACTGTCACCCACCTG
1841 GCAGTTAACCGGGTACCAAGAAGTGGGAAGCCAGCTGAGCTGCTGAAGATGTTTGGTATCGACAGGGATGCCATTGCACA
1921 AGCTGTGAGGGGCCTCATCACCAAGGCCTAGGGCGGGTATGAAGTGTGGGGCGGGGGTCTATACATTCCTGAGATTCTGG
2001 GAAAGGTGCTCAAAGATGTACTGAGAGGAGGGGTAAATATATGTTTTGAGAAAAATGAAAAAAAAAAAAAAAAAAAAA
Table B11K2. Protein sequence of variant NOV2a11p (underlined). (SEQ ID NO:132)
      1 MESYHKPDQQKLQALKDTANRLRISSIQATTAAGSGHPTSCCSAAEIMAVLFFHTMRYKSQDPRNPHNDRFVLSKGHAAP
    81 ILYAVWAEAGFLAEAELLNLRKISSDLDGHPVPKQAFTDVATGSLGQGLGAACGMAYTGKYFDKASYRVYCLLGDGELSE
  161 GSVWEAMAFASIYKLDNLVAILDINRLGQSDPAPLQHQMDIYQKRCEAFGWHAIIVDGHSVEELCKAFGQAKHQPTAIIA
  241 KTFKGRGITGVEDKESWHGKPLPKNMAEQIIQEIYSQIQSKKKILATPPQEDAPSVDIANIRNPSLPSYKVGDKIATRKA
  321 YGQALAKLGHASDRIIALDGDTKNSTFSEIFKKEHPDRFIECYIAEQNMVSIAVGCATRNRTVPFCSTFAAFFTRAFDQI
  401 RMAAISESNINLCGSHCGVSIGEDGPSQMALEDLAMFRSVPTSTVFYPSDGVATEKAVELAANTKGICFIRTSRPENAII
  481 YNNNEDFQVGQAKVVLKSKDDQVTVIGAGVTLHEALAAAELLKKEKINIRVLDPFTIKPLDRKLILDSARATKGRILTVE
  561 DHYYEGGIGEAVSSAVVGEPGITVTHLAVNRVPRSGKPAELLKMFGIDRDAIAQAVRGLITKA
Table B11K3. Alteration effect
No change.
Table B11L1.
Nucleotide sequence of variant 13380072 NOV2a12n (underlined). C/T (SEQ ID NO:133)
      1 GGCACGAGGGCCTGTCGCCGCGGGAGCAGCCGCTATCTCTGTGTGTCCGCGTGTGCGCCCGGTCCCCGCCTGCCGCACCA
    81 TGGAGAGCTACCACAAGCCTGACCAGCAGAAGCTGCAGGCCTTGAAGGACACGGCCAACCGCCTACGTATCAGCTCCATC
  161 CAGGCCACCACTGCGGCGGGCTCTGGCCACCCCACGTCATGCTGCAGCGCCGCAGAGATCATGGCTGTCCTCTTTTTCCA
  241 CACCATGCGCTACAAGTCCCAGGACCCCCGGAATCCGCACAATGACCGCTTTGTGCTCTCCAAGGGCCATGCAGCTCCCA
  321 TCCTCTACGCGGTCTGGGCTGAAGCTGGTTTCCTGGCCGAGGCGGAGCTGCTGAACCTGAGGAAGATCAGCTCCGACTTG
  401 GACGGGCACCCGGTCCCGAAACAAGCTTTCACCGACGTGGCCACTGGCTCCCTGGGCCAGGGCCTCGGGGCCGCTTGTGG
  481 GATGGCCTACACCGGCAAATACTTCGACAAGGCCAGCTACCGAGTCTATTGCTTGCTGGGAGATGGGGAGCTGTCAGAGG
  561 GCTCTGTATGGGAGGCCATGGCCTTCGCCAGCATCTATAAGCTGGACAACCTTGTGGCCATTCTAGACATCAATCGCCTG
  641 GGCCAGAGTGACCCGGCCCCGCTGCAGCACCAGATGGACATCTACCAGAAGCGGTGCGAGGCCTTCGGTTGGCATGCCAT
  721 CATCGTGGATGGACACAGCGTGGAGGAGCTGTGCAAGGCCTTTGGCCAGGCCAAGCACCAGCCAACAGCCATCATTGCCA
  801 AGACCTTCAAGGGCCGAGGGATCACGGGGGTAGAAGATAAGGAGTCTTGGCATGGGAAGCCCCTCCCCAAAAACATGGCT
  881 GAGCAGATCATCCAGGAGATCTACAGCCAGATCCAGAGCAAAAAGAAGATCCTGGCAACCCCTCCACAGGAGGACGCACC
  961 CTCAGTGGACATTGCCAACATCCGCATGCCCAGCCTGCCCAGCTACAAAGTTGGGGACAAGATAGCCACCCGCAAGGCCT
1041 ACGGGCAGGCACTGGCCAAGCTGGGCCATGCCAGTGACCGCATCATCGCCCTGGATCGGGACACCAAAAATTCCACCTTC
1121 TCGGAGATCTTCAAAAAGGAGCACCCGGACCGCTTCATCGAGTGCTACATTGCCGAGCAGAACATGGTGAGCATCGCGGT
1201 GGGCTGTGCCACCCGCAACAGGACGGTGCCCTTCTGCAGCACTTTTGCAGCCTTCTTCACGCGGGCCTTTGACCAGATTC
1281 GCATGGCCGCCATCTCCGAGAGCAACATCAACCTCTGCGGCTCCCACTGCGGCGTTTCCATCGGGGAAGACGGGCCCTCC
1361 CAGATGGCCCTAGAAGATCTGGCTATGTTTCGGTCAGTCCCCACATCAACTGTCTTTTACCCAAGTGATGGCGTTGCTAC
1441 AGAGAAGGCAGTGGAACTAGCCGCCAATACAAAGGGTATCTGCTTCATCCGGACCAGCCGCCCAGAAAATGCCATCATTT
1521 ATAACAACAATGAGGACTTCCAGGTCGGACAAGCCAAGGTGGTCCTGAAGAGCAAGGATGACCAGGTGACCGTTATCGGG
1601 GCTGGGGTGACCCTGCACGAGGCCTTGGCCGCTGCCGAACTGCTGAAGAAAGAAAAGATCAACATCCGCGTGCTGGACCC
1681 CTTCACCATCAAGCCCCTGGACAGAAAACTCATTCTCGACAGCGCTCGTGCCACCAAGGGCAGGATCCTCACCGTGGAGG
1761 ACCATTATTATGAAGGTGGCATTGGTGAGGCTGTGTCCAGTGCAGTAGTGGGCGAGCCTGGCATCACTGTCACCCACCTG
1841 GCAGTTAACCGGGTACCAAGAAGTGGGAAGCCAGCTGACCTGCTGAAGATGTTTGGTATCGACAGGGATGCCATTGCACA
1921 AGCTGTGAGGGGCCTCATCACCAAGGCCTAGGGCGGGTATGAAGTGTGGGGCGGGGGTCTATACATTCCTGAGATTCTGG
2001 GAAAGGTGCTCAAAGATGTACTGAGAGGAGGGGTAAATATATGTTTTGAGAAAAATGAAAA
Table B11L2. Protein sequence of variant NOV2a12p (underlined). (SEQ ID NO:134)
      1 MESYHKPDQQKLQALKDTANRLRISSIQATTAAGSGHPTSCCSAAEIMAVLFFHTMRYKSQDPRNPHNDRFVLSKGHAAP
    81 ILYAVWAEAGFLAEAELLNLRKISSDLDGHPVPKQAFTDVATGSLGOGLGAACGMAYTGKYFDKASYRVYCLLGDGELSE
  161 GSVWEAMAFASIYKLDNLVAILDINRLGOSDPAPLQHQMDIYQKRCEAFGWHAIIVDGHSVEELCKAFGQAKHQPTAIIA
  241 KTFKGRGITGVEDKESWHGKPLPKNMAEQIIQEIYSQIQSKKKILATPPQEDAPSVDIANIRNPSLPSYKVGDKIATRKA
  321 YGQALAKLGHASDRIIALDGDTKNSTFSEIFKKEHPDRFIECYIAEQNMVSIAVGCATRNRTVPFCSTFAAFFTRAFDQI
  401 RMAAISESNINLCGSHCGVSIGEDGPSQMALEDLANFRSVPTSTVFYPSDGVATEKAVELAANTKGICFIRTSRPENAII
  481 YNNNEDFQVGQAKVVLKSKDDQVTVIGAGVTLHEALAAAELLKKEKINIRVLDPFTIKPLDRKLILDSARATKGRILTVE
  561 DHYYEGGIGEAVSSAVVGEPGITVTHLAVNRVPRSGKPAELLKMFGIDRDAIAQAVRGLITKA
Table B11L3. Alteration effect
No change.
Table B11M1.
Nucleotide sequence of variant 13380093 NOV2a13n (underlined). A/G (SEQ ID NO:135)
      1 GGCACGAGGGCCTGTCGCCGCGGGAGCAGCCGCTATCTCTGTGTGTCCGCGTGTGCGCCCGGTCCCCGCCTGCCGCACCA
    81 TGGAGAGCTACCACAAGCCTGACCAGCAGAAGCTGCAGGCCTTGAAGGACACGGCCAACCGCCTACGTATCAGCTCCATC
  161 CAGGCCACCACTGCGGCGGGCTCTGGCCACCCCACGTCATGCTGCAGCGCCGCAGAGATCATGGCTGTCCTCTTTTTCCA
  241 CACCATGCGCTACAAGTCCCAGGACCCCCGGAATCCGCACAATGACCGCTTTGTGCTCTCCAAGGGCCATGCAGCTCCCA
  321 TCCTCTACGCGGTCTGGGCTGAAGCTGGTTTCCTGGCCGAGGCGGAGCTGCTGAACCTGAGGAAGATCAGCTCCGACTTG
  401 GACGGGCACCCGGTCCCGAAACAAGCTTTCACCGACGTGGCCACTGGCTCCCTGGGCCAGGGCCTCGGGGCCGCTTGTGG
  481 GATGGCCTACACCGGCAAATACTTCGACAAGGCCAGCTACCGAGTCTATTGCTTGCTGGGAGATGGGGAGCTGTCAGAGG
  561 GCTCTGTATGGGAGGCCATGGCCTTCGCCAGCATCTATAAGCTGGACAACCTTGTGGCCATTCTAGACATCAATCGCCTG
  641 GGCCAGAGTGACCCGGCCCCGCTGCAGCACCAGATGGACATCTACCAGAAGCGGTGCGAGGCCTTCGGTTGGCATGCCAT
  721 CATCGTGGATGGACACAGCGTGGAGGAGCTGTGCAAGGCCTTTGGCCAGGCCAAGCACCAGCCAACACCCATCATTGCCA
  801 AGACCTTCAAGGGCCGAGGGATCACGGGGGTAGAAGATAAGGAGTCTTGGCATGGGAAGCCCCTCCCCAAAAACATGGCT
  881 GAGCAGATCATCCAGGAGATCTACAGCCAGATCCAGAGCAAAAAGAAGATCCTGGCAACCCCTCCACAGGAGGACGCACC
  961 CTCAGTGGACATTGCCAACATCCGCATGCCCAGCCTGCCCAGCTACAAAGTTGGGGACAAGATAGCCACCCGCAAGGCCT
1041 ACGGGCAGGCACTGGCCAAGCTGGGCCATGCCAGTGACCGCATCATCGCCCTGGATGGGGACACCAAAAATTCCACCTTC
1121 TCGGAGATCTTCAAAAAGGAGCACCCGGACCGCTTCATCGAGTGCTACATTGCCGAGCAGAACATGGTGAGCATCGCGGT
1201 GGGCTGTGCCACCCGCAACAGGACGGTGCCCTTCTGCAGCACTTTTGCAGCCTTCTTCACGCGGGCCTTTGACCAGATTC
1281 GCATGGCCGCCATCTCCGAGAGCAACATCAACCTCTGCGGCTCCCACTGCGGCGTTTCCATCGGGGAAGACGGGCCCTCC
1361 CAGATGGCCCTAGAAGATCTGGCTATGTTTCGGTCAGTCCCCACATCAACTGTCTTTTACCCAAGTGATGGCGTTGCTAC
1441 AGAGAAGGCAGTGGAACTAGCCGCCAATACAAACGGTATCTGCTTCATCCGGACCAGCCGCCCAGAAAATGCCATCATCT
1521 ATAACAACGATGAGGACTTCCAGGTCGGACAAGCCAAGGTGGTCCTGAAGAGCAAGGATGACCAGGTGACCGTTATCGGG
1601 GCTGGGGTGACCCTGCACGAGGCCTTGGCCGCTGCCGAACTGCTGAAGAAAGAAAAGATCAACATCCGCGTGCTGGACCC
1681 CTTCACCATCAAGCCCCTGGACAGAAAACTCATTCTCGACAGCGCTCGTGCCACCAAGGGCAGGATCCTCACCGTGGAGG
1761 ACCATTATTATGAAGGTGGCATTGGTGAGGCTGTGTCCAGTGCAGTAGTGGGCGAGCCTGGCATCACTGTCACCCACCTG
1841 GCAGTTAACCGGGTACCAAGAAGTGGGAAGCCAGCTGAGCTGCTGAAGATGTTTGGTATCGACAGGGATGCCATTGCACA
1921 AGCTGTGAGGGGCCTCATCACCAAGGCCTAGGGCGGGTATGAAGTGTGGGGCGGGGGTCTATACATTCCTGAGATTCTGG
2001 GAAAGGTGCTCAAAGATGTACTGAGAGGAGGGGTAAATATATGTTTTGAGAAAAATGAAAAAAAAAAAAAAAAAAAAA
Table B11M2. Protein sequence of variant NOV2a13p (underlined). (SEQ ID NO:136)
      1 MESYHKPDQQKLQALKDTANRLRISSIQATTAAGSGHPTSCCSAAEIMAVLFFHTMRYKSQDPRNPHNDRFVLSKGHAAP
    81 ILYAVWAEAGFLAEAELLNLRKISSDLDGHPVPKQAFTDVATGSLGQGLGAACGMAYTGKYFDKASYRVYCLLGDGELSE
  161 GSVWEAMAFASIYKLDNLVAILDINRLGQSDPAPLQHQMDIYQKRCEAFGWHAIIVDGHSVEELCKAFGQAKHQPTAIIA
  241 KTFKGRGITGVEDKESWHGKPLPKNMAEQIIQEIYSQIQSKKKILATPPQEDAPSVDIANIRNPSLPSYKVGDKIATRKA
  321 YGQALAKLGHASDRIIALDGDThNSTFSEIFKKEHPDRFIECYIAEQNMVSIAVGCATRNRTVPFCSTFAAFPTRAFDQI
  401 RMAAISESNINLCGSHCGVSIGEDGPSQMALEDLAMFRSVPTSTVFYPSDGVATEKAVELAANTKGICFIRTSRPENAII
  481 YNNDEDFQVGQAKVVLKSKDDQVTVIGAGVTLHEALAAAELLKKEKINIRVLDPFTIKPLDRKLILDSARATKGRILTVE
  561 DHYYEGGIGEAVSSAVVGEPGITVTHLAVNRVPRSGKPAELLKMFGIDRDAIAQAVRGLITKA
Table B11M3. Alteration effect
Asn to Asp
Table B11N1.
Nucleotide sequence of variant 13380094 NOV2a14n (underlined). C/T (SEQ ID NO:137)
      1 GGCACGAGGGCCTGTCGCCGCGGGAGCAGCCGCTATCTCTGTGTGTCCGCGTGTGCGCCCGGTCCCCGCCTGCCGCACCA
    81 TGGAGAGCTACCACAAGCCTGACCAGCAGAAGCTGCAGGCCTTGAAGGACACGGCCAACCGCCTACGTATCAGCTCCATC
  161 CAGGCCACCACTGCGGCGGGCTCTGGCCACCCCACGTCATGCTGCAGCGCCGCAGAGATCATGGCTGTCCTCTTTTTCCA
  241 CACCATGCGCTACAAGTCCCAGGACCCCCGGAATCCGCACAATGACCGCTTTGTGCTCTCCAAGGGCCATGCAGCTCCCA
  321 TCCTCTACGCGGTCTGGGCTGAAGCTGGTTTCCTGGCCGAGGCGGAGCTGCTGAACCTGAGGAAGATCAGCTCCGACTTG
  401 GACGGGCACCCGGTCCCGAAACAAGCTTTCACCGACGTGGCCACTGGCTCCCTGGGCCAGGGCCTCGGGGCCGCTTGTGG
  481 GATGGCCTACACCGGCAAATACTTCGACAAGGCCAGCTACCGAGTCTATTGCTTGCTGGGAGATGGGGAGCTGTCAGAGG
  561 GCTCTGTATGGGAGGCCATGGCCTTCGCCAGCATCTATAAGCTGGACAACCTTGTGGCCATTCTAGACATCAATCGCCTG
  641 GGCCAGAGTGACCCGGCCCCGCTGCAGCACCAGATGGACATCTACCAGAAGCGGTGCGAGGCCTTCGGTTGGCATGCCAT
  721 CATCGTGGATGGACACAGCGTGGAGGAGCTGTGCAAGGCCTTTGGCCAGGCCAAGCACCAGCCAACAGCCATCATTGCCA
  801 AGACCTTCAAGGGCCGAGGGATCACGGGGGTAGAAGATAAGGAGTCTTGGCATGGGAAGCCCCTCCCCAAAAACATGGCT
  881 GAGCAGATCATCCAGGAGATCTACAGCCAGATCCAGAGCAAAAAGAAGATCCTGGCAACCCCTCCACAGGAGGACGCACC
  961 CTCAGTGGACATTGCCAACATCCGCATGCCCAGCCTGCCCAGCTACAAAGTTGGGGACAAGATAGCCACCCGCAAGGCCT
1041 ACGGGCAGGCACTGGCCAAGCTGGGCCATGCCAGTGACCGCATCATCGCCCTGGATGGGGACACCAAAAATTCCACCTTC
1121 TCGGAGATCTTCAAAAAGGAGCACCCGGACCGCTTCATCGAGTGCTACATTGCCGAGCAGAACATGGTGAGCATCGCGGT
1201 GGGCTGTGCCACCCGCAACAGGACGGTGCCCTTCTGCAGCACTTTTGCAGCCTTCTTCACGCGGGCCTTTGACCAGATTC
1281 GCATGGCCGCCATCTCCGAGAGCAACATCAACCTCTGCGGCTCCCACTGCGGCGTTTCCATCGGGGAAGACGGGCCCTCC
1361 CAGATGGCCCTAGAAGATCTGGCTATGTTTCGGTCAGTCCCCACATCAACTGTCTTTTACCCAAGTGATGGCGTTGCTAC
1441 AGAGAAGGCAGTGGAACTAGCCGCCAATACAAAGGGTATCTGCTTCATCCGGACCAGCCGCCCAGAAAATGCCATCATCT
1521 ATAACAACAATGAGGACTTCCAGGTCGGATAAGCCAAGGTGGTCCTGAAGAGCAAGGATGACCAGGTGACCGTTATCGGG
1601 GCTGGGGTGACCCTGCACGAGGCCTTGGCCGCTGCCGAACTGCTGAAGAAAGAAAAGATCAACATCCGCGTGCTGGACCC
1681 CTTCACCATCAAGCCCCTGGACAGAAAACTCATTCTCGACAGCGCTCGTGCCACCAAGGGCAGGATCCTCACCGTGGAGG
1761 ACCATTATTATGAAGGTGGCATTGGTGAGGCTGTGTCCAGTGCAGTAGTGGGCGAGCCTGGCATCACTGTCACCCACCTG
1841 GCAGTTAACCGGGTACCAACAAGTGGGAAGCCAGCTGAGCTGCTGAAGATGTTTGGTATCGACAGGGATGCCATTGCACA
1921 AGCTGTGAGGGGCCTCATCACCAAGGCCTAGGGCGGGTATGAAGTGTGGGGCGGGGGTCTATACATTCCTGAGATTCTGG
2001 GAAAGGTGCTCAAAGATGTACTGAGAGGAGGGGTAAATATATGTTTTGAGAAAAATGAAAAAAAAAAAAAAAAAAAAA
Table B11N2. Protein sequence of variant NOV2a14p (underlined). (SEQ ID NO:138)
      1 MESYHKPDQQKLQALKDTANRLRISSIQATTAAGSGHPTSCCSAAEIMAVLFFHTMRYKSQDPRNPHNDRFVLSKGHAAP
    81 ILYAVWAEAGFLAEAELLNLRKISSDLDGHPVPKQAFTDVATGSLGQGLGAACGMAYTCKYFDKASYRVYCLLGDGELSE
  161 GSVWEAMAFASIYKLDNLVAILDINRLGQSDPAPLQHQMDIYQKRCEAFGWHAIIVDGHSVEELCKAFGQAKHQPTAIIA
  241 KTFKGRGITGVEDKESWHGKPLPKNMAEQIIQEIYSQIQSKKKILATPPQEDAPSVDIANIRNPSLPSYKVGDKIATRKA
  321 YGQALAKLGHASDRIIALDGDTKNSTFSEIFKKEHPDRFIECYIAEQNMVSIAVGCATRNRTVPFCSTFAAFFTRAFDQI
  401 RMAAISESNINLCGSHCGVSIGEDGPSQMALEDLAMFRSVPTSTVFYPSDGVATEKAVELAANTKGICFIRTSRPENAII
  481 YNNNEDFQVG*AKVVLKSKDDQVTVIGAGVTLHEALAAAELLKKEKINIRVLDPFTIKPLDRKLILDSARATKGRILTVE
  561 DHYYEGGIGEAVSSAVVGEPGITVTHLAVNRVPRSGKPAELLKMFGIDRDAIAQAVRGLITKA
Table B11N3. Alteration effect
Gln to STOP
Table B11O1.
Nucleotide sequence of variant 13380095 NOV2a15n (underlined). T/C (SEQ ID NO:139)
      1 GGCACGAGGGCCTGTCGCCGCGGGAGCAGCCGCTATCTCTGTGTGTCCGCGTGTGCGCCCGGTCCCCGCCTGCCGCACCA
    81 TGGAGAGCTACCACAAGCCTGACCAGCAGAAGCTGCAGGCCTTGAAGGACACGGCCAACCGCCTACGTATCAGCTCCATC
  161 CAGGCCACCACTGCGGCGGGCTCTGGCCACCCCACGTCATGCTGCAGCGCCGCAGAGATCATGGCTGTCCTCTTTTTCCA
  241 CACCATGCGCTACAAGTCCCAGGACCCCCGGAATCCGCACAATGACCGCTTTGTGCTCTCCAAGGGCCATGCAGCTCCCA
  321 TCCTCTACGCGGTCTGGGCTGAAGCTGGTTTCCTGGCCGAGGCGGAGCTGCTGAACCTGAGGAAGATCAGCTCCGACTTG
  401 GACGGGCACCCGGTCCCGAAACAAGCTTTCACCGACGTGGCCACTGGCTCCCTGGGCCAGGGCCTCGGGGCCGCTTGTGG
  481 GATGGCCTACACCGGCAAATACTTCGACAAGGCCAGCTACCGAGTCTATTGCTTGCTGGGAGATGGGGAGCTGTCAGAGG
  561 GCTCTGTATGGGAGGCCATGGCCTTCGCCAGCATCTATAAGCTGGACAACCTTGTGGCCATTCTAGACATCAATCGCCTG
  641 GGCCAGAGTGACCCGGCCCCGCTGCAGCACCAGATGGACATCTACCAGAAGCGGTGCGAGGCCTTCGGTTGGCATGCCAT
  721 CATCGTGGATGGACACAGCGTGGAGGAGCTGTGCAAGGCCTTTGGCCAGGCCAAGCACCAGCCAACAGCCATCATTGCCA
  801 AGACCTTCAAGGGCCGAGGGATCACGGGGGTAGAAGATAAGGAGTCTTGGCATGGGAAGCCCCTCCCCAAAAACATGGCT
  881 GAGCAGATCATCCAGGAGATCTACAGCCAGATCCAGAGCAAAAAGAAGATCCTGGCAACCCCTCCACAGGAGGACGCACC
  961 CTCAGTGGACATTGCCAACATCCGCATGCCCAGCCTGCCCAGCTACAAAGTTGGGGACAAGATAGCCACCCGCAAGGCCT
1041 ACGGGCAGGCACTGGCCAAGCTGGGCCATGCCAGTGACCGCATCATCGCCCTGGATGGGGACACCAAAAATTCCACCTTC
1121 TCGGAGATCTTCAAAAAGGAGCACCCGGACCGCTTCATCGAGTGCTACATTGCCGAGCAGAACATGGTGAGCATCGCGGT
1201 GGGCTGTGCCACCCGCAACAGGACGGTGCCCTTCTGCAGCACTTTTGCAGCCTTCTTCACGCGGGCCTTTGACCAGATTC
1281 GCATGGCCGCCATCTCCGAGAGCAACATCAACCTCTGCGGCTCCCACTGCGGCGTTTCCATCGGGGAAGACGGGCCCTCC
1361 CAGATGGCCCTAGAACATCTGGCTATGTTTCGGTCAGTCCCCACATCAACTGTCTTTTACCCAAGTGATGGCGTTGCTAC
1441 AGAGAAGGCAGTGGAACTAGCCGCCAATACAAAGGGTATCTGCTTCATCCGGACCAGCCGCCCAGAAAATGCCATCATCT
1521 ATAACAACAATGAGGACTTCCAGGTCGGACAAGCCAAGGTGGTCCTGAAGAGCAAGGATGACCAGGTGACCGTTATCGGG
1601 GCCGGGGTGACCCTGCACGAGGCCTTGGCCGCTGCCGAACTGCTGAAGAAAGAAAAGATCAACATCCGCGTGCTGGACCC
1681 CTTCACCATCAAGCCCCTGGACAGAAAACTCATTCTCGACAGCGCTCGTGCCACCAAGGGCAGGATCCTCACCGTGGAGG
1761 ACCATTATTATGAAGGTGGCATTGGTGAGGCTGTGTCCAGTGCAGTAGTGGGCGAGCCTGGCATCACTGTCACCCACCTG
1841 GCAGTTAACCGGGTACCAAGAAGTGGGAAGCCAGCTGAGCTGCTGAAGATGTTTGGTATCGACAGGGATGCCATTGCACA
1921 AGCTGTGAGGGGCCTCATCACCAAGGCCTAGGGCGGGTATGAAGTGTGGGGCGGGGGTCTATACATTCCTGAGATTCTGG
2001 GAAAGGTGCTCAAAGATGTACTGAGAGGAGGGGTAAATATATGTTTTGAGAAAAATGAAAAAAAAAAAAAAAAAAAAA
Table B11O2. Protein sequence of variant NOV2a15p (underlined). (SEQ ID NO:140)
      1 MESYHKPDQQKLQALKDTANRLRISSIQATTAAGSGHPTSCCSAAEIMAVLFFHTMRYKSQDPRNPHNDRFVLSKGHAAP
    81 ILYAVWAEAGFLAEAELLNLRKISSDLDGHPVPKQAFTDVATGSLGQGLGAACGMAYTGKYPDKASYRVYCLLGDGELSE
  161 GSVWEAMAFASIYKLDNLVAILDINRLGQSDPAPLQHQMDIYQKRCEAFGWHAIIVDGHSVEELCKAFGQAKHQPTAIIA
  241 KTFKGRGITGVEDKESWHGKPLPKNMAEQIIQEIYSQIQSKKKILATPPQEDAPSVDIANIRMPSLPSYKVGDKIAThKA
  321 YGQALAKLGHASDRIIALDGDTKNSTFSEIFKKEHPDRFIECYIAEQNMVSIAVGCATRNRTVPFCSTFAAFFTRAFDQI
  401 RMAAISESNINLCGSHCGVSIGEDGPSQMALEDLANFRSVPTSTVFYPSDGVATEKAVELAANTKGICFIRTSRPENAII
  481 YNNNEDFQVGQAKVVLKSKDDQWEVIGAGVTLHEALAAAELLKKEKINIRVLDPFTIKPLDRKLILDSARATKGRILTVE
  561 DHYYEGGIGEAVSSAVVGEPGITVTHLAVNRVPRSGKPAELLKNFGIDRDAIAQAVRGLITKA
Table B11O3. Alteration effect
No change.
Table B11P1.
Nucleotide sequence of variant 13380052 NOV2a16n (underlined). G/T (SEQ ID NO:141)
      1 GGCACGAGGGCCTGTCGCCGCGGGAGCAGCCGCTATCTCTGTGTGTCCGCGTGTGCGCCCGGTCCCCGCCTGCCGCACCA
    81 TGGAGAGCTACCACAAGCCTGACCAGCAGAAGCTGCAGGCCTTGAAGGACACGGCCAACCGCCTACGTATCAGCTCCATC
  161 CAGGCCACCACTGCGGCGGGCTCTGGCCACCCCACGTCATGCTGCAGCGCCGCAGAGATCATGGCTGTCCTCTTTTTCCA
  241 CACCATGCGCTACAAGTCCCAGGACCCCCGGAATCCGCACAATGACCGCTTTGTGCTCTCCAAGGGCCATGCAGCTCCCA
  321 TCCTCTACGCGGTCTGGGCTGAAGCTGGTTTCCTGGCCGAGGCGGAGCTGCTGAACCTGAGGAAGATCAGCTCCGACTTG
  401 GACGGGCACCCGGTCCCGAAACAAGCTTTCACCGACGTGGCCACTGGCTCCCTGGGCCAGGGCCTCGGGGCCGCTTGTGG
  481 GATGGCCTACACCGGCAAATACTTCGACAAGGCCAGCTACCGAGTCTATTGCTTGCTGGGAGATGGGGAGCTGTCAGAGG
  561 GCTCTGTATGGGAGGCCATGGCCTTCGCCAGCATCTATAAGCTGGACAACCTTGTGGCCATTCTAGACATCAATCGCCTG
  641 GGCCAGAGTGACCCGGCCCCGCTGCAGCACCAGATGGACATCTACCAGAAGCGGTGCGAGGCCTTCGGTTGGCATGCCAT
  721 CATCGTGGATGGACACAGCGTGGAGGAGCTGTGCAAGGCCTTTGGCCAGGCCAAGCACCAGCCAACAGCCATCATTGCCA
  801 AGACCTTCAAGGGCCGAGGGATCACGGGGGTAGAAGATAAGGAGTCTTGGCATGGGAAGCCCCTCCCCAAAAACATGGCT
  881 GAGCAGATCATCCAGGAGATCTACAGCCAGATCCAGAGCAAAAAGAAGATCCTGGCAACCCCTCCACAGGAGGACGCACC
  961 CTCAGTGGACATTGCCAACATCCGCATGCCCAGCCTGCCCAGCTACAAAGTTGGGGACAAGATAGCCACCCGCAAGGCCT
1041 ACGGGCAGGCACTGGCCAAGCTGGGCCATGCCAGTGACCGCATCATCGCCCTGGATGGGGACACCAAAAATTCCACCTTC
1121 TCGGAGATCTTCAAAAAGGAGCACCCGGACCGCTTCATCGAGTGCTACATTGCCGAGCAGAACATGGTGAGCATCGCGGT
1201 GGGCTGTGCCACCCGCAACAGGACGGTGCCCTTCTGCAGCACTTTTGCAGCCTTCTTCACGCGGGCCTTTGACCAGATTC
1281 GCATGGCCGCCATCTCCGAGAGCAACATCAACCTCTGCGGCTCCCACTGCGGCGTTTCCATCGGGGAAGACGGGCCCTCC
1361 CAGATGGCCCTAOAAGATCTGGCTATGTTTCGGTCAGTCCCCACATCAACTGTCTTTTACCCAAGTGATGGCGTTGCTAC
1441 AGAGAAGGCAGTGGAACTAGCCGCCAATACAAAGGGTATCTGCTTCATCCGGACCAGCCGCCCAGAAAATGCCATCATCT
1521 ATAACAACAATGAGGACTTCCAGGTCGGACAAGCCAAGGTGGTCCTGAAGAGCAAGGATGACCAGGTGACCGTTATCGGG
1601 GCTGGGGTGACCCTGCACGAGGCCTTGGCCGCTGCCGAACTGCTTAAGAAAGAAAAGATCAACATCCGCGTGCTGGACCC
1681 CTTCACCATCAAGCCCCTGGACAGAAAACTCATTCTCGACAGCGCTCGTGCCACCAAGGGCAGGATCCTCACCGTGGAGG
1761 ACCATTATTATGAAGGTGGCATTGGTGAGGCTGTGTCCAGTGCAGTAGTGGGCGAGCCTGGCATCACTGTCACCCACCTG
1841 GCAGTTAACCGGGTACCAAGAAGTGGGAAGCCAGCTGAGCTGCTGAAGATGTTTGGTATCGACAGGGATGCCATTGCACA
1921 AGCTGTGAGGGGCCTCATCACCAAGGCCTAGGGCGGGTATGAAGTGTGGGGCGGGGGTCTATACATTCCTGAGATTCTGG
2001 GAAAGGTGCTCAAAGATGTACTGAGAGGAGGGGTAATATATGTTTTGAGAAAAATGAAAAAAAAAAAAAAAAAAAAAA
Table B11P2. Protein sequence of variant NOV2a16p (underlined). (SEQ ID NO:142)
      1 MESYHKPDQQKLQALKDTANRLRISSIQATTAAGSGHPTSCCSAAEIMAVLFFHTMRYKSQDPRNPHNDRFVLSKGHAAP
    81 ILYAVWAEAGFLAEAELLNLRKISSDLDGHPVPKQAFTDVATGSLGQGLGAACGMAYTGKYFDKASYRVYCLLGDGELSE
  161 GSVWEAMAFASIYKLDNLVAILDINRLGQSDPAPLQHQMDIYQKRCEAFGWEAIIVDGHSVEELCKAFGQAKHQPTAIIA
  241 KTFKGRGITGVEDKESWHGKPLPKNMAEQIIQEIYSQIQSKKKILATPPQEDAPSVDIANIRNPSLPSYKVGDKIATRKA
  321 YGQALAKLGHASDRIIALDGDTKNSTFSEIFKKEHPDRFIECYIAEQNMVSIAVGCATRNRTVPFCSTFAAFFTRAFDQI
  401 RMAAISESNINLCGSHCGVSIGEDGPSQMALEDLAMFRSVPTSTVPYPSDGVATEKAVELAANTKGICFIRTSRPENAII
  481 YNNNEDFQVGQAKVVLKSKDDQVTVIGAGVTLHEALAAAELLKKEKINIRVLDPFTIKPLDRKLILDSARATKGRILTVE
  561 DHYYEGGIGEAVSSAVVGEPGITVTHLAVNRVPRSGKPAELLKMFGIDRDAIAQAVRGLITKA
Table B11P3. Alteration effect
No change.
Table B11Q1.
Nucleotide sequence of variant 13377691 NOV2a17n (underlined). T/C (SEQ ID NO:143)
      1 GGCACGAGGGCCTGTCGCCGCGGGAGCAGCCGCTATCTCTGTGTGTCCGCGTGTGCGCCCGGTCCCCGCCTGCCGCACCA
    81 TGGAGAGCTACCACAAGCCTGACCAGCAGAAGCTGCAGGCCTTGAAGGACACGGCCAACCGCCTACGTATCAGCTCCATC
  161 CAGGCCACCACTGCGGCGGGCTCTGGCCACCCCACGTCATGCTGCAGCGCCGCAGAGATCATGGCTGTCCTCTTTTTCCA
  241 CACCATGCGCTACAAGTCCCAGGACCCCCGGAATCCGCACAATGACCGCTTTGTGCTCTCCAAGGGCCATGCAGCTCCCA
  321 TCCTCTACGCGGTCTGGGCTGAAGCTGGTTTCCTGGCCGAGGCGGAGCTGCTGAACCTGAGGAAGATCAGCTCCGACTTG
  401 GACGGGCACCCGGTCCCGAAACAAGCTTTCACCGACGTGGCCACTGGCTCCCTGGGCCAGGGCCTCGGGGCCGCTTGTGG
  481 GATGGCCTACACCGGCAAATACTTCGACAAGGCCAGCTACCGAGTCTATTGCTTGCTGGGAGATGGGGAGCTGTCAGAGG
  561 GCTCTGTATGGGAGGCCATGGCCTTCGCCAGCATCTATAAGCTGGACAACCTTGTGGCCATTCTAGACATCAATCGCCTG
  641 GGCCAGAGTGACCCGGCCCCGCTGCAGCACCAGATGGACATCTACCAGAAGCGGTGCGAGGCCTTCGGTTGGCATGCCAT
  721 CATCGTGGATGAACACAGCGTGGAGGAGCTGTGCAAGGCCTTTGGCCAGGCCAAGCACCAGCCAACAGCCATCATTGCCA
  801 AGACCTTCAAGGGCCGAGGGATCACGGGGGTAGAAGATAAGGAGTCTTGGCATGGGAAGCCCCTCCCCAAAAACATGGCT
  881 GAGCAGATCATCCAGGAGATCTACAGCCAGATCCAGAGCAAAAAGAAGATCCTGGCAACCCCTCCACAGGAGGACGCACC
  961 CTCAGTGGACATTGCCAACATCCGCATGCCCAGCCTGCCCAGCTACAAAGTTGGGGACAAGATAGCCACCCGCAAGGCCT
1041 ACGGGCAGGCACTGGCCAAGCTGGGCCATGCCAGTGACCGCATCATCGCCCTGGATGGGGACACCAAAAATTCCACCTTC
1121 TCGGAGATCTTCAAAAAGGAGCACCCGGACCGCTTCATCGAGTGCTACATTGCCGAGCAGAACATGGTGAGCATCGCGGT
1201 GGGCTGTGCCACCCGCAACAGGACGGTGCCCTTCTGCAGCACTTTTGCAGCCTTCTTCACGCGGGCCTTTGACCAGATTC
1281 GCATGGCCGCCATCTCCGAGAGCAACATCAACCTCTGCGGCTCCCACTGCGGCGTTTCCATCGGGGAAGACGGGCCCTCC
1361 CAGATGGCCCTAGAAGATCTGGCTATGTTTCGGTCAGTCCCCACATCAACTGTCTTTTACCCAAGTGATGGCGTTGCTAC
1441 AGAGAAGGCAGTGGAACTAGCCGCCAATACAAAGGGTATCTGCTTCATCCGGACCAGCCGCCCAGAAAATGCCATCATCT
1521 ATAACAACAATGAGGACTTCCAGGTCGGACAAGCCAAGGTGGTCCTGAAGAGCAAGGATGACCAGGTGACCGTTATCGGG
1601 GCTGGGGTGACCCTGCACGAGGCCTTGGCCGCTGCCGAACTGCTGAAGAAAGAAAAGATCAACATCCGCGTGCTGGACCC
1681 CTCCACCATCAAGCCCCTGGACAGAAAACTCATTCTCGACAGCGCTCGTGCCACCAAGGGCAGGATCCTCACCGTGGAGG
1761 ACCATTATTATGAAGGTGGCATTGGTGAGGCTGTGTCCAGTGCAGTAGTGGGCGAGCCTGGCATCACTGTCACCCACCTG
1841 GCAGTTAACCGGGTACCAAGAAGTGGGAAGCCAGCTGAGCTGCTGAAGATGTTTGGTATCGACAGGGATGCCATTGCACA
1921 AGCTGTGAGGGGCCTCATCACCAAGGCCTAGGGCGGGTATGAAGTGTGGGGCGGGGGTCTATACATTCCTGAGATTCTGG
2001 GAAAGGTGCTCAAAGATGTACTGAGAGGAGGGGTAAATATATGTTTTGAGAAAAATGAAAAAAAAAAAAAAAAAAAAA
Table B11Q2. Protein sequence of variant NOV2a17p (underlined). (SEQ ID NO:144)
      1 MESYHKPDQQKLQALKDTANRLRISSIQATTAAGSGHPTSCCSAAEIMAVLFFHTMRYKSQDPRNPHNDRFVLSKGHAAP
    81 ILYAVWAEAGFLAEAELLNLRKISSDLDGHPVPKQAFTDVATGSLGQGLGAACGMAYTGKYFDKASYRVYCLLGDGELSE
  161 GSVWEAMAFASIYKLDNLVAILDINRLGQSDPAPLQHQMDIYQKRCEAFGWHAIIVDGHSVEELCKAFGQAKHQPTAIIA
  241 KTFKGRGITGVEDKESWHGKPLPKNMAEQIIQEIYSQIQSKKKILATPPQEDAPSVDIANIRMPSLPSYKVGDKIATRKA
  321 YGQALAKLGHASDRIIALDGDTKNSTFSEIFKKEHPDRFIECYIAEQNNVSIAVGCATRNRTVPFCSTFAAFFTRAFDQI
  401 RMAAISESNINLCGSHCGVSIGEDGPSQMALEDLAMFRSVPTSTVFYPSDGVATEKAVELAANTKGICFIRTSRPENAII
  481 YNNNEDFQVGQAKVVLKSKDDQVTVIGAGVTLHEALAAAELLKKEKINIRVLDPSTIKPLDRKLILDSARATKGRILTVE
  561 DHYYEGGIGEAVSSAVVGEPGITVTHLAVNRVPRSGKPAELLKMFGIDRDAIAQAVRGLITKA
Table B11Q3. Alteration effect
Phe to Ser
Table B11R1.
Nucleotide sequence of variant 13380053 NOV2a18n (underlined). T/C (SEQ ID NO:145)
      1 GGCACGAGGGCCTGTCGCCGCGGGAGCAGCCGCTATCTCTGTGTGTCCGCGTGTGCGCCCGGTCCCCGCCTGCCGCACCA
    81 TGGACAGCTACCACAAGCCTGACCAGCAGAAGCTGCAGGCCTTGAAGGACACGGCCAACCGCCTACGTATCAGCTCCATC
  161 CAGGCCACCACTGCGGCGGGCTCTGGCCACCCCACGTCATGCTGCAGCGCCGCAGAGATCATGGCTGTCCTCTTTTTCCA
  241 CACCATGCGCTACAAGTCCCAGGACCCCCGGAATCCGCACAATGACCGCTTTGTGCTCTCCAAGGGCCATGCAGCTCCCA
  321 TCCTCTACGCGGTCTGGGCTGAAGCTGGTTTCCTGGCCGAGGCGGAGCTGCTGAACCTGAGGAAGATCAGCTCCGACTTG
  401 GACGGGCACCCGGTCCCGAAACAAGCTTTCACCGACGTGGCCACTGGCTCCCTGGGCCAGGGCCTCGGGGCCGCTTGTGG
  481 GATGGCCTACACCGGCAAATACTTCGACAAGGCCAGCTACCGAGTCTATTGCTTGCTGGGAGATGGGGAGCTGTCAGAGG
  561 GCTCTGTATGGGAGGCCATGGCCTTCGCCAGCATCTATAAGCTGGACAACCTTGTGGCCATTCTAGACATCAATCGCCTG
  641 GGCCAGAGTGACCCGGCCCCGCTGCAGCACCAGATGGACATCTACCAGAAGCGGTGCGAGGCCTTCGGTTGGCATGCCAT
  721 CATCGTGGATGGACACAGCGTGGAGGAGCTGTGCAAGGCCTTTGGCCAGGCCAAGCACCAGCCAACAGCCATCATTGCCA
  801 AGACCTTCAAGGGCCGAGGGATCACGGGGGTAGAAGATAAGGAGTCTTGGCATGGGAAGCCCCTCCCCAAAAACATGGCT
  881 GAGCAGATCATCCAGGAGATCTACAGCCAGATCCAGAGCAAAAAGAAGATCCTGGCAACCCCTCCACAGGAGGACGCACC
  961 CTCAGTGGACATTGCCAACATCCGCATGCCCAGCCTGCCCAGCTACAAAGTTGGGGACAAGATAGCCACCCGCAAGGCCT
1041 ACGGGCAGGCACTGGCCAAGCTGGGCCATGCCAGTGACCGCATCATCGCCCTGGATGGGGACACCAAAAATTCCACCTTC
1121 TCGGAGATCTTCAAAAAGGAGCACCCGGACCGCTTCATCGAGTGCTACATTGCCGAGCAGAACATGGTGAGCATCGCGGT
1201 GGGCTGTGCCACCCGCAACAGGACGGTGCCCTTCTGCAGCACTTTTCCAGCCTTCTTCACGCGGGCCTTTGACCAGATTC
1281 GCATGGCCGCCATCTCCGAGAGCAACATCAACCTCTGCGGCTCCCACTGCGGCGTTTCCATCGGGGAAGACGGGCCCTCC
1361 CAGATGGCCCTAGAAGATCTGGCTATGTTTCGGTCAGTCCCCACATCAACTGTCTTTTACCCAAGTGATGGCGTTGCTAC
1441 AGAGAAGGCAGTGGAACTAGCCGCCAATACAAAGGGTATCTGCTTCATCCGGACCAGCCGCCCAGAAAATGCCATCATCT
1521 ATAACAACAATGAGGACTTCCAGGTCGGACAAGCCAAGGTGGTCCTGAAGAGCAAGGATGACCAGGTGACCGTTATCGGG
1601 GCTGGGGTGACCCTGCACGAGGCCTTGGCCGCTGCCGAACTGCTGAAGAAAGAAAAGATCAACATCCGCGTGCTGGACCC
1681 CTTCACCATCAAGCCCCTGGACAGAAAACTCATTCTCGACAGCGCTCGTGCCACCAAGGGCAGGATCCTCACCGTGGAGG
1761 ACCATTATTATGAAGGTGGCATCGGTGAGGCTGTGTCCAGTGCAGTAGTGGGCGAGCCTGGCATCACTGTCACCCACCTG
1841 GCAGTTAACCGGGTACCAAGAAGTGGGAAGCCAGCTGAGCTGCTGAAGATGTTTGGTATCGACAGGGATGCCATTGCACA
1921 AGCTGTGAGGGGCCTCATCACCAAGGCCTAGGGCGGGTATGAAGTGTGGGGCGGGGGTCTATACATTCCTGAGATTCTGG
2001 GAAAGGTGCTCAAAGATGTACTGAGAGGAGGGGTAAATATATGTTTTGAGAAAAATGAAAAAAAAAAAAAAAAAAAAA
Table B11R2. Protein sequence of variant NOV2a18p (underlined). (SEQ ID NO:146)
      1 MESYHKPDQQKLQALKDTANRLRISSIQATTAAGSGHPTSCCSAAEIMAVLFFHTMRYKSQDPRNPHNDRFVLSKGHAAP
    81 ILYAVWAEAGFLAEAELLNLRKISSDLDGHPVPKQAFTDVATGSLGOGLGAACGMAYTGKYFDKASYRVYCLLGDGELSE
  161 GSVWEAMAFASIYKLDNLVAILDINRLGOSDPAPLQHQMDIYQKRCEAFGWHAIIVDGHSVEELCKAFGQAKHQPTAIIA
  241 KTFKGRGITGVEDKESWHGKPLPKNMAEQIIQEIYSQIQSKKKILATPPQEDAPSVDIANIRNPSLPSYKVGDKIATRKA
  321 YGQALAKLGHASDRIIALDGDTKNSTFSEIFKKEHPDRFIECYIAEQWMVSIAVGCATRNRTVPFCSTFAAFFTRAFDQI
  401 RMAAISESNINLCGSHCGVSIGEDGPSQMALEDLAMFRSVPTSTVPYPSDGVATEKAVELAANTKGICFIRTSRPENAII
  481 YNNNEDFQVGQAKVVLKSKDDQVTVIGAGVTLHEALAAAELLKKEKINIRVLDPFTIKPLDRKLILDSARATKGRILTVE
  561 DHYYEGGIGEAVSSAVVGEPGITVTHLAVNRVPRSGKPAELLKMFGIDRDAIAQAVRGLITKA
Table B11R3. Alteration effect
No change.
3S1.
Nucleotide sequence of variant 13377686 NOV2a19n (underlined). G/A (SEQ ID NO:147)
      1 GGCACGAGGGCCTGTCGCCGCGGGAGCAGCCGCTATCTCTGTGTGTCCGCGTGTGCGCCCGGTCCCCGCCTGCCGCACCA
    81 TGGAGAGCTACCACAAGCCTGACCAGCAGAAGCTGCAGGCCTTGAAGGACACGGCCAACCGCCTACGTATCAGCTCCATC
  161 CAGGCCACCACTGCGGCGGGCTCTGGCCACCCCACGTCATGCTGCAGCGCCGCAGAGATCATGGCTGTCCTCTTTTTCCA
  241 CACCATGCGCTACAAGTCCCAGGACCCCCGGAATCCGCACAATGACCGCTTTGTGCTCTCCAAGGGCCATGCAGCTCCCA
  321 TCCTCTACGCGGTCTGGGCTGAAGCTGGTTTCCTGGCCGAGGCGGAGCTGCTGAACCTGAGGAAGATCAGCTCCGAGTTG
  401 GACGGGCACCCGGTCCCGAAACAAGCTTTCACCGACGTGGCCACTGGCTCCCTGGGCCAGGGCCTCGGGGCCGCTTGTGG
  481 GATGGCCTACACCGGCAAATACTTCGACAAGGCCAGCTACCGAGTCTATTGCTTGCTGGGAGATGGGGAGCTGTCAGAGG
  561 GCTCTGTATGGGAGGCCATGGCCTTCGCCTGCATCTATAAGCTGGACAACCTTGTGGCCATTCTAGACATCAATCGCCTG
  641 GGCCAGAGTGACCCGGCCCCGCTGCAGCACCAGATGGACATCTACCAGAAGCGGTGCGAGGCCTTCGGTTGGCATGCCAT
  721 CATCGTGGATGGACACAGCGTGGAGGAGCTGTGCAAGGCCTTTGGCCAGGCCAAGCACCAGCCAACAGCCATCATTGCCA
  801 AGACCTTCAAGGGCCGAGGGATCACGGGGGTAGAAGATAAGGAGTCTTGGCATGGGAAGCCCCTCCCCAAAAACATGGCT
  881 GAGCAGATCATCCAGGAGATCTACAGCCAGATCCAGAGCAAAAAGAAGATCCTGGCAACCCCTCCACAGGAGGACGCACC
  961 CTCAGTGGACATTGCCAACATCCGCATGCCCAGCCTGCCCAGCTACAAAGTTGGGGACAAGATAGCCACCCGCAAGGCCT
1041 ACGGGCAGGCACTGGCCAAGCTGGGCCATGCCAGTGACCGCATCATCGCCCTGGATGGGGACACCAAAAATTCCACCTTC
1121 TCGGAGATCTTCAAAAAGGAGCACCCGGACCGCTTCATCGAGTGCTACATTGCCGAGCAGAACATGGTGAGCATCGCGGT
1201 GGGCTGTGCCACCCGCAACAGGACGGTGCCCTTCTGCAGCACTTTTGCAGCCTTCTTCACGCGGGCCTTTGACCAGATTC
1281 GCATGGCCGCCATCTCCGAGAGCAACATCAACCTCTGCGGCTCCCACTGCGGCGTTTCCATCGGGGAAGACGGGCCCTCC
1361 CAGATGGCCCTAGAAGATCTGGCTATGTTTCGGTCAGTCCCCACATCAACTGTCTTTTACCCAAGTGATGGCGTTGCTAC
1441 AGAGAAGGCAGTGGAACTAGCCGCCAATACAAAGGGTATCTGCTTCATCCGGACCAGCCGCCCAGAAAATGCCATCATCT
1521 ATAACAACAATGAGGACTTCCAGGTCGGACAAGCCAAGGTGGTCCTGAAGAGCAAGGATGACCAGGTGACCGTTATCGGG
1601 GCTGGGGTGACCCTGCACGAGGCCTTGGCCGCTGCCGAACTGCTGAAGAAAGAAAAGATCAACATCCGCGTGCTGGACCC
1681 CTTCACCATCAAGCCCCTGGACAGAAAACTCATTCTCGACAGCGCTCGTGCCACCAAGGGCAGGATCCTCACCGTGGAGG
1761 ACCATTATTATGAAGGTGGCATTGGTGAGGCTGTGTCCAGTACAGTAGTGGGCGAGCCTGGCATCACTGTCACCCACCTG
1841 GCAGTTAACCGGGTACCAAGAAGTGGGAAGCCAGCTGAGCTGCTGAAGATGTTTGGTATCGACAGGGATGCCATTGCACA
1921 AGCTGTGAGGGGCCTCATCACCAAGGCCTAGGGCGGGTATGAAGTGTGGGGCGGGGGTCTATACATTCCTGAGATTCTGG
2001 GAAGGTGCTCAAAGATGTACTGAGAGGAGGGGTAAATATATGTTTTGAGAAAAATGAAAAAAAAAAAAAAAAAAAAAA
Table B11S2. Protein sequence of variant NOV2a19p (underlined). (SEQ ID NO:148)
      1 MESYHKPDQQKLQALKDTANRLRISSIQATTAAGSGHPTSCCSAAEIMAVLFFHTMRYKSQDPRNPHNDRFVLSKGHAAP
    81 ILYAVWAEAGFLAEAELLNLRKISSDLDGHPVPKQAFTDVATGSLGQGLGAACGMAYTGKYFDKASYRVYCLLGDGELSE
  161 GSVWEAMAFASIYKLDNLVAILDINRLGQSDPAPLQHQMDIYQKRCEAFGWHAIIVDGHSVEELCKAFGQAKHQPTAIIA
  241 KTFKGRGITGVEDKESWHGKPLPKNMAEQIIQEIYSQIQSKKKILATPPQEDAPSVDIANIRMPSLPSYKVGDKIATRKA
  321 YGQALAKLGHASDRIIALDGDTKNSTFSEIFKKEHPDRFIECYIAEQWMVSIAVGCATRNRTVPFCSTFAAFFTRAFDQI
  401 RMAAISESNINLCGSHCGVSIGEDGPSQMALEDLAMFRSVPTSTVFYPSDGVATEKAVELAANTKGICFIRTSRPENAII
  481 YNNNEDFQVGQAKVVLKSKDDQVTVIGAGVTLHEALAAAELLKKEKINIRVLDPFTIKPLDRKLILDSARATKGRILTVE
  561 DHYYEGGIGEAVSSTVVGEPGITVTHLAVNRVPRSGKPAELLKMFGIDRDAIAQAVRGLITKA
Table B11S3. Alteration effect
Ala to Thr
Table B11T1.
Nucleotide sequence of variant 13380055 NOV2a20n (underlined). C/T (SEQ ID NO:149)
      1 GGCACGAGGGCCTGTCGCCGCGGGAGCAGCCGCTATCTCTGTGTGTCCGCGTGTGCGCCCGGTCCCCGCCTGCCGCACCA
    81 TGGAGAGCTACCACAAGCCTGACCAGCAGAAGCTGCAGGCCTTGAAGGACACGGCCAACCGCCTACGTATCAGCTCCATC
  161 CACGCCACCACTGCGGCGGGCTCTGGCCACCCCACGTCATGCTGCAGCGCCGCAGAGATCATGGCTGTCCTCTTTTTCCA
  241 CACCATGCGCTACAAGTCCCAGGACCCCCGGAATCCGCACAATGACCGCTTTGTGCTCTCCAAGGGCCATGCAGCTCCCA
  321 TCCTCTACGCGGTCTGGCCTGAAGCTGGTTTCCTCGCCGAGGCGGAGCTGCTGAACCTGAGGAAGATCAGCTCCGACTTG
  401 GACGGGCACCCGGTCCCGAAACAAGCTTTCACCGACGTGGCCACTGGOTCCCTGGGCCAGGGCCTCGGGGCCGCTTGTGG
  481 GATGGCCTACACCGGCAAATACTTCGACAAGGCCAGCTACCGAGTCTATTGCTTGCTGGGAGATGGGGAGCTGTCAGAGG
  561 GCTCTGTATGCGAGGCCATGGCCTTCGCCAGCATCTATAAGCTGGACAACCTTGTGGCCATTCTAGACATCAATCGCCTG
  641 GGCCAGAGTGACCCGGCCCCGCTGCAGCACCAGATGGACATCTACCAGAAGCGGTGCGAGGCCTTCGGTTGGCATGCCAT
  721 CATCGTGGATGGACACAGCGTGGAGGAGCTGTGCAAGGCCTTTGGCCAGGCCAAGCACCAGCCAACAGCCATCATTGCCA
  801 AGACCTTCAAGGGCCGAGGGATCACGGGGGTAGAAGATAAGGAGTCTTGGCATGGGAAGCCCCTCCCCAAAAACATGGCT
  881 GAGCAGATCATCCAGGAGATCTACAGCCAGATCCAGAGCAAAAAGAAGATCCTGGCAACCCCTCCACAGGAGGACGCACC
  961 CTCAGTGGACATTGCCAACATCCGCATGCCCAGCCTGCCCAGCTACAAAGTTGGGGACAAGATAGCCACCCGCAAGGCCT
1041 ACCGGCAGGCACTGGCCAAGCTGGGCCATGCCAGTGACCGCATCATCGCCCTGGATGGGGACACCAAAAATTCCACCTTC
1121 TCGGAGATCTTCAAAAAGGAGCACCCGGACCGCTTCATCGAGTGCTACATTGCCGAGCAGAACATGGTGAGCATCGCGGT
1201 GGGCTGTGCCACCCGCAACAGGACGGTGCCCTTCTGCAGCACTTTTGCAGCCTTCTTCACGCGGGCCTTTGACCAGATTC
1281 GCATGGCCGCCATCTCCGAGAGCAACATCAACCTCTGCGGCTCCCACTGCGGCGTTTCCATCGGGGAAGACGGGCCCTCC
1361 CAGATGGCCCTAGAAGATCTGGCTATGTTTCGGTCAGTCCCCACATCAACTGTCTTTTACCCAAGTGATGGCGTTGCTAC
1441 AOAGAAGGCAGTGGAACTAGCCGCCAATACAAAGGGTATCTGCTTCATCCGGACCAGCCGCCCAGAAAATGCCATCATCT
1521 ATAACAACAATGAGGACTTCCACGTCGGACAAGCCAAGGTGGTCCTGAAGAGCAAGGATGACCAGGTGACCGTTATCGGG
1601 GCTGGGGTGACCCTGCACGAGGCCTTGGCCGCTGCCGAACTGCTGAAGAAAGAAAAGATCAACATCCGCGTGCTGGACCC
1681 CTTCACCATCAAGCCCCTGGACAGAAAACTCATTCTCGACAGCGCTCGTGCCACCAAGGGCAGGATCCTCACCGTGGAGG
1761 ACCATTATTATGAAGGTGGCATTGGTGAGGCTGTGTCCAGTGCAGTAGTGGGTGAGCCTGGCATCACTGTCACCCACCTG
1841 GCAGTTAACCGGGTACCAAGAAGTGGGAAGCCAGCTGAGCTGCTGAAGATGTTTGGTATCGACAGGGATGCCATTGCACA
1921 AGCTGTGAGGGGCCTCATCACCAAGGCCTAGGGCGGGTATGAAGTGTGGGGCGGGGGTCTATACATTCCTGAGATTCTGG
2001 GAAAGGTGCTCAAAGATGTACTGAGAGGAGGCGTAAATATATGTTTTGAGAAAAATAAAAAAAAAAAAAAAAAAAAAA
Table B11T2. Protein sequence of variant NOV2a20p (underlined). (SEQ ID NO:150)
      1 MESYHKPDQQKLQALKDTANRLRISSIQATTAAGSGHPTSCCSAAEIMAVLFFHTMRYKSQDPRNPHNDRFVLSKGHAAP
    81 ILYAVWAEAGFLAEAELLNLRKISSDLDGHPVPKQAFTDVATGSLGQGLGAACGMAYTGKYFDKASYRVYCLLGDGELSE
  161 GSVWEAMAFASIYKLDNLVAILDINRLGOSDPAPLQHQMDIYQKRCEAFGWHAIIVDGHSVEELCKAFGQAKHQPTAIIA
  241 KTFKGRGITGVEDKESWHGKPLPKNMAEQIIQEIYSQIQSKKKILATPPQEDAPSVDIANIRNPSLPSYKVGDKIATRKA
  321 YGQALAKLGHASDRIIALDGDTKNSTFSEIFKKEHPDRFIECYIAEQNMVSIAVGCATRNRTVPFCSTEAAFFTRAFDQI
  401 RMAAISESNINLCGSHCGVSIGEDGPSQMALEDLAMFRSVPTSTVFYPSDGVATEKAVELAANTKGICPIRTSRPENAII
  481 YNNNEDFQVGQAKVVLKSKDDQVTVIGAGVTLHEALAAAELLKKEKINIRVLDPFTIKPLDRKLILDSARATKGRILTVE
  561 DHYYEGGIGEAVSSAVVGEPGITVTHLAVNRVPRSGKPAELLKMFGIDRDAIAQAVRGLITKA
Table B11T3. Alteration effect
No change.
Table B11U1.
Nucleotide sequence of variant 13377685 NOV2a21n (underlined). A/G (SEQ ID NO:151)
      1 GGCACGAGGGCCTGTCGCCGCGGGAGCAGCCGCTATCTCTGTGTGTCCGCGTGTGCGCCCGGTCCCCGCCTGCCGCACCA
    81 TGGAGAGCTACCACAAGCCTGACCAGCAGAAGCTGCAGGCCTTGAAGGACACGGCCAACCGCCTACGTATCAGCTCCATC
  161 CAGGCCACCACTGCGGCGGGCTCTGGCCACCCCACGTCATGCTGCAGCGCCGCAGAGATCATGGCTGTCCTCTTTTTCCA
  241 CACCATGCGCTACAAGTCCCAGGACCCCCGGAATCCGCACAATGACCGCTTTGTGCTCTCCAAGGGCCATGCAGCTCCCA
  321 TCCTCTACGCGGTCTGGGCTGAAGCTGGTTTCCTGGCCGAGGCGGAGCTGCTGAACCTGAGGAAGATCAGCTCCGACTTG
  401 GACGGGCACCCGGTCCCGAAACAAGCTTTCACCGACGTGGCCACTGGCTCCCTGGGCCAGGGCCTCGGGGCCGCTTGTGG
  481 GATGGCCTACACCGGCAAATACTTCGACAAGGCCAGCTACCGAGTCTATTGCTTGCTGGGAGATGGGGAGCTGTCAGAGG
  561 GCTCTGTATGGGAGGCCATGGCCTTCGCCAGCATCTATAAGCTGGACAACCTTGTGGCCATTCTAGACATCAATCGCCTG
  641 GGCCAGAGTGACCCGGCCCCGCTGCAGCACCAGATGGACATCTACCAGAAGCGGTGCGAGGCCTTCGGTTGGCATGCCAT
  721 CATCGTGGATGGACACAGCGTGGAGGAGCTGTGCAAGGCCTTTGGCCAGGCCAAGCACCAGCCAACAGCCATCATTGCCA
  801 AGACCTTCAAGGGCCGAGGGATCACGGGGGTAGAAGATAAGGAGTCTTGGCATGGGAAGCCCCTCCCCAAAAACATGGCT
  881 GAGCAGATCATCCAGGAGATCTACAGCCAGATCCAGAGCAAAAAGAAGATCCTGGCAACCCCTCCACAGGAGGACGCACC
  961 CTCAGTGGACATTGCCAACATCCGCATGCCCAGCCTGCCCAGCTACAAAGTTGGGGACAAGATAGCCACCCGCAAGGCCT
1041 ACGGGCAGGCACTGGCCAAGCTGGGCCATGCCAGTGACCGCATCATCGCCCTGGATGGGGACACCAAAAATTCCACCTTC
1121 TCGGAGATCTTCAAAAAGGAGCACCCGGACCGCTTCATCGAGTGCTACATTGCCGAGCAGAACATGGTGAGCATCGCGGT
1201 GGGCTGTGCCACCCGCAACAGGACGGTGCCCTTCTGCAGCACTTTTGCAGCCTTCTTCACGCGGGCCTTTGACCAGATTC
1281 GCATGGCCGCCATCTCCGAGAGCAACATCAACCTCTGCGGCTCCCACTGCGGCGTTTCCATCGGGGAAGACGGGCCCTCC
1361 CAGATGGCCCTAGAAGATCTGGCTATGTTTCGGTCAGTCCCCACATCAACTGTCTTTTACCCAAGTGATGGCGTTGCTAC
1441 AGAGAAGGCAGTGGAACTAGCCGCCAATACAAAGGGTATCTGCTTCATCCGGACCAGCCGCCCAGAAAATGCCATCATCT
1521 ATAACAACAATGAGGACTTCCAGGTCGGACAAGCCAAGGTGGTCCTGAAGAGCAAGGATGACCAGGTGACCGTTATCGGG
1601 GCTGGGGTGACCCTGCACGAGGCCTTGGCCGCTGCCGAACTGCTGAAGAAAGAAAAGATCAACATCCGCGTGCTGGACCC
1681 CTTCACCATCAAGCCCCTGGACAGAAAACTCATTCTCGACAGCGCTCGTGCCACCAAGGGCAGGATCCTCACCGTGGAGG
1761 ACCATTATTATGAAGGTGGCATTGGTGAGGCTGTGTCCAGTGCAGTAGTGGGCGAGCCTGGCATCACTGTCGCCCACCTG
1841 GCAGTTAACCGGGTACCAAGAAGTGGGAAGCCAGCTGAGCTGCTGAAGATGTTTGGTATCGACAGGGATGCCATTGCACA
1921 AGCTGTGAGGGGCCTCATCACCAAGGCCTAGGGCGGGTATGAAGTGTGGGGCGGGGGTCTATACATTCCTGAGATTCTGG
2001 GAAAGGTGCTCAAAGATGTACTGAGAGGAGGGGTAAATATATGTTTTGAGAAAAATGAAAAAAAAAAAAAAAAAAAAA
Table B11U2. Protein sequence of variant NOV2a21p (underlined). (SEQ ID NO:152)
      1 MESYHKPDQQKLQALKDTANRLRISSIQATTAAGSGHPTSCCSAAEIMAVLFFHTMRYKSQDPRNPHNDRFVLSKGHAAP
    81 ILYAVWAEAGFLAEAELLNLRKISSDLDGHPVPKQAFTDVATGSLGQGLGAACGMAYTGKYFDKASYRVYCLLGDGSLSE
  161 GSVWEAMAFASIYKLDNLVAILDINRLGQSDPAPLQHQMDIYQKRCEAFGWHAIIVDGHSVEELCKAFGQAKHQPTAIIA
  241 KTFKGRGITGVEDKESWHGKPLPKNMAEQIIQEIYSQIQSKKKILATPPQEDAPSVDIANIRMPSLPSYKVGDKIATRKA
  321 YGQALAKLGHASDRIIALDGDTKNSTFSEIFKKEHPDRFIECYIAEQNMVSIAVGCATRNRTVPPCSTFAAFFTRAFDQI
  401 RMAAISESNINLCGSHCGVSIGEDGPSQMALEDLANFRSVPTSTVFYPSDGVATEKAVELAANTKGICFIRTSRPENAII
  481 YNNNEDFQVGQAKVVLKSKDDQVTVIGAGVTLHEALAAAELLKKEKINIRVLDPFTIKPLDRKLILDSARATKGRILTVE
  561 DHYYEGGIGEAVSSAVVGEPGITVAHLAVNRVPRSGKPAELLKMFGIDRDAIAQAVRGLITKA
Table B11U3. Alteration effect
Thr to Ala
Table B11V1.
Nucleotide sequence of variant 13380056 NOV2a22n (underlined). A/G (SEQ ID NO:153)
      1 GGCACGAGGGCCTGTCGCCGCGGGAGCAGCCGCTATCTCTGTGTGTCCGCGTGTGCGCCCGGTCCCCGCCTGCCGCACCA
    81 TGGAGAGCTACCACAAGCCTGACCAGCAGAAGCTGCAGGCCTTGAAGGACACGGCCAACCGCCTACGTATCAGCTCCATC
  161 CAGGCCACCACTGCGGCGGGCTCTGGCCACCCCACGTCATGCTGCAGCGCCGCAGAGATCATGGCTGTCCTCTTTTTCCA
  241 CACCATGCGCTACAAGTCCCAGGACCCCCGGAATCCGCACAATGACCGCTTTGTGCTCTCCAAGGGCCATGCAGCTCCCA
  321 TCCTCTACGCGGTCTGGGCTGAAGCTGGTTTCCTGGCCGAGGCGGAGCTGCTGAACCTGAGGAAGATCAGCTCCGACTTC
  401 GACGGGCACCCGGTCCCGAAACAAGCTTTCACCGACGTGGCCACTGGCTCCCTGGGCCAGGGCCTCGGGGCCGCTTGTGG
  481 GATGGCCTACACCGGCAAATACTTCGACAAGGCCAGCTACCGAGTCTATTGCTTGCTGGGAGATGGGGAGCTGTCAGAGG
  561 GCTCTGTATGGGAGGCCATGGCCTTCGCCAGCATCTATAAGCTGGACAACCTTGTGGCCATTCTAGACATCAATCGCCTG
  641 GGCCAGAGTGACCCGGCCCCGCTGCAGCACCAGATGGACATCTACCAGAAGCGGTGCGAGGCCTTCGGTTGGCATGCCAT
  721 CATCGTGGATGGACACAGCGTGGAGGAGCTGTGCAAGGCCTTTGGCCAGGCCAAGCACCAGCCAACAGCCATCATTGCCA
  801 AGACCTTCAAGGGCCGAGGGATCACGGGGGTAGAAGATAAGGAGTCTTGGCATGGGAAGCCCCTCCCCAAAAACATGGCT
  881 GAGCAGATCATCCAGGAGATCTACAGCCAGATCCAGAGCAAAAAGAAGATCCTGGCAACCCCTCCACAGGAGGACGCACC
  961 CTCAGTGGACATTGCCAACATCCGCATGCCCAGCCTGCCCAGCTACAAAGTTGGGGACAAGATAGCCACCCGCAAGGCCT
1041 ACGGGCAGGCACTGGCCAAGCTGGGCCATGCCAGTGACCGCATCATCGCCCTGGATGGGGACACCAAAAATTCCACCTTC
1121 TCGGAGATCTTCAAAAAGGAGCACCCGGACCGCTTCATCGAGTGCTACATTGCCGAGCAGAACATGGTGAGCATCGCGGT
1201 GGGCTGTGCCACCCGCAACAGGACGGTGCCCTTCTGCAGCACTTTTGCAGCCTTCTTCACGCGGGCCTTTGACCAGATTC
1281 GCATGGCCGCCATCTCCGAGAGCAACATCAACCTCTGCGGCTCCCACTGCGGCGTTTCCATCGGGGAAGACGGGCCCTCC
1361 CAGATGGCCCTAGAAGATCTGGCTATGTTTCGGTCAGTCCCCACATCAACTGTCTTTTACCCAAGTGATGGCGTTGCTAC
1441 AGAGAAGGCAGTGGAACTAGCCGCCAATACAAAGGGTATCTGCTTCATCCGGACCAGCCGCCCAGAAAATGCCATCATcT
1521 ATAACAACAATGAGGACTTCCAGGTCGGACAAGCCAAGGTGGTCCTGAAGAGCAAGGATGACCAGGTGACCGTTATcGGG
1601 GCTGGGGTGACCCTGCACGAGGCCTTGGCCGCTGCCGAACTGCTGAAGAAAGAAAAGATCAACATCCGCGTGCTGGACCC
1681 CTTCACCATCAAGCCCCTGGACAGAAAACTCATTCTCGACAGCGCTCGTGCCACCAAGGGCAGGATCCTCACCGTGGAGG
1761 ACCATTATTATGAAGGTGGCATTGGTGAGGCTGTGTCCAGTGCAGTAGTGGGCGAGCCTGGCATCACTGTCACCCACCTG
1841 GCAGTTAACCGGGTACCAAGAGGTGGGAAGCCAGCTGAGCTGCTGAAGATGTTTGGTATCGACAGGGATGCCATTGCACA
1921 AGCTGTGAGGGGCCTCATCACCAAGGCCTAGGGCGGGTATGAAGTGTGGGGCGGGGGTCTATACATTCCTGAGATTCTGG
2001 GAAAGGTGCTCAAAGATGTACTGAGAGGAGGGGTAAATATATGTTTTGAGAAAAATGAAAAAAAAAAAAAAAAAAAAA
Table B11V2. Protein sequence of variant NOV2a22p (underlined). (SEQ ID NO:154)
      1 MESYHKPDQQKLQALKDTANRLRISSIQATTAAGSGHPTSCCSAAEIMAVLFFHTMRYKSQDPRNPHNDRFVLSKGHAAP
    81 ILYAVWAEAGFLAEAELLNLRKISSDLDGHPVPKQAFTDVATGSLGQGLGAACGMAYTGKYFDKASYRVYCLLGDGELSE
  161 GSVWEAMAFASIYKLDNLVAILDINRLGQSDPAPLQHQMDIYQKRCEAFGWHAIIVDGHSVEELCKAFGQAKHQPTAIIA
  241 KTFKGRGITGVEDKESWHGKPLPKNMAEQIIQEIYSQIQSKKKILATPPQEDAPSVDIANIRNPSLpSyKvGDKIATRKA
  321 YGQALAKLGHASDRIIALDGDTKNSTFSEIFKKEHPDRFIECYIAEQNMVSIAVGCATHNRTVPFCSTFAAFFTRAPDQI
  401 RMAAISESNIHLCGSHCGVSIGEDGPSQMALEDLAMFRSVPTSTVFYPSDGVATEKAVELAANTKGICFIRTSRPENAII
  481 YNNNEDFQVGQAKVVLKSKDDQVTVIGAGVTLHEALAAAELLKKEKINIRVLDPFTIKPLDRKLILDSARATKGRILTVE
  561 DHYYEGGIGEAVSSAVVGEPGITVTHLAVNRVPRGGKPAELLKMFGIDRDAIAQAVRGLITKA
Table B11V3. Alteration effect
Ser to Gly
```

### EXAMPLE B4

### Expression Profiles of Transketolase

[0428] The protocol for quantitative expression analysis is disclosed in Example Q9.

[0429] Expression of gene CG175387-01 and G175387-03 was assessed using the primer-probe set Ag6328, described in Table B 12. Results of the RTQ-PCR runs are shown in Tables B13, B14 and B15.

TABLE B12
Probe Name Ag6328

| | | | Start | SEQ ID |
|---|---|---|---|---|
| Primers | Sequences | Length | Position | No |
| Forward | 5′-cctagggcgggtatgaagt-3′ | 19 | 1947 | 180 |
| Probe | TET-5′-ccagaatctcaggaatgtatagacccc-3′- | 27 | 1974 | 181 |
| | TAMRA | | | |
| Reverse | 5′-tcagtacatctttgagcacctttc-3′ | 24 | 2001 | 182 |

[0430] TABLE B13
General screening panel v1.5

| | Rel. Exp. (%) |
|---|---|
| | Ag6328, Run |
| Tissue Name | 259211050 |
| Adipose | 4.1 |
| Melanoma* Hs688(A).T | 7.6 |
| Melanoma* Hs688(B).T | 8.2 |
| Melanoma* M14 | 17.9 |
| Melanoma* LOXIMVI | 13.1 |
| Melanoma* SK-MEL-5 | 10.5 |
| Squamous cell carcinoma SCC-4 | 8.0 |
| Testis Pool | 2.0 |
| Prostate ca.* (bone met) PC-3 | 2.6 |
| Prostate Pool | 1.6 |
| Placenta | 3.0 |
| Uterus Pool | 0.6 |
| Ovarian ca. OVCAR-3 | 5.4 |
| Ovarian ca. SK-OV-3 | 13.6 |
| Ovarian ca. OVCAR-4 | 5.1 |
| Ovarian ca. OVCAR-5 | 11.7 |
| Ovarian ca. IGROV-1 | 29.1 |
| Ovarian ca. OVCAR-8 | 10.6 |
| Ovary | 1.8 |
| Breast ca. MCF-7 | 4.5 |
| Breast ca. MDA-MB-231 | 19.2 |
| Breast ca. BT 549 | 55.1 |
| Breast ca. T47D | 7.9 |
| Breast ca. MDA-N | 85.9 |
| Breast Pool | 1.1 |
| Trachea | 1.2 |
| Lung | 2.1 |
| Fetal Lung | 5.3 |
| Lung ca. NCI-N417 | 6.3 |
| Lung ca. LX-1 | 9.5 |
| Lung ca. NCI-H146 | 2.7 |
| Lung ca. SHP-77 | 12.4 |
| Lung ca. A549 | 92.0 |
| Lung ca. NCI-H526 | 1.9 |
| Lung ca. NCI-H23 | 2.6 |
| Lung ca. NCI-H460 | 6.7 |
| Lung ca. HOP-62 | 9.5 |
| Lung ca. NCI-H522 | 2.0 |
| Liver | 0.3 |
| Fetal Liver | 2.4 |
| Liver ca. HepG2 | 7.6 |
| Kidney Pool | 1.4 |
| Fetal Kidney | 1.4 |
| Renal ca. 786-0 | 10.8 |
| Renal ca. A498 | 27.4 |
| Renal ca. ACHN | 18.8 |
| Renal ca. UO-31 | 10.4 |
| Renal ca. TK-10 | 6.9 |
| Bladder | 2.5 |
| Gastric ca. (liver met.) NCI-N87 | 3.7 |
| Gastric ca. KATO III | 29.7 |
| Colon ca. SW-948 | 2.6 |
| Colon ca. SW480 | 20.6 |
| Colon ca.* (SW480 met) SW620 | 7.6 |
| Colon ca. HT29 | 8.8 |
| Colon ca. HCT-116 | 30.1 |
| Colon ca. CaCo-2 | 12.3 |
| Colon cancer tissue | 7.9 |
| Colon ca. SW1116 | 5.2 |
| Colon ca. Colo-205 | 5.0 |
| Colon ca. SW-48 | 3.7 |
| Colon Pool | 0.8 |
| Small Intestine Pool | 1.3 |
| Stomach Pool | 1.1 |
| Bone Marrow Pool | 1.3 |
| Fetal Heart | 0.4 |
| Heart Pool | 0.6 |
| Lymph Node Pool | 2.6 |
| Fetal Skeletal Muscle | 1.0 |
| Skeletal Muscle Pool | 0.6 |
| Spleen Pool | 1.7 |
| Thymus Pool | 2.6 |
| CNS cancer (glio/astro) U87-MG | 16.6 |
| CNS cancer (glio/astro) U-118-MG | 10.9 |
| CNS cancer (neuro; met) SK-N-AS | 6.0 |
| CNS cancer (astro) SF-539 | 3.9 |
| CNS cancer (astro) SNB-75 | 100.0 |
| CNS cancer (glio) SNB-19 | 36.1 |
| CNS cancer (glio) SF-295 | 16.3 |
| Brain (Amygdala) Pool | 3.4 |
| Brain (cerebellum) | 8.0 |
| Brain (fetal) | 3.6 |
| Brain (Hippocampus) Pool | 1.4 |
| Cerebral Cortex Pool | 3.9 |
| Brain (Substantia nigra) Pool | 2.4 |
| Brain (Thalamus) Pool | 5.1 |
| Brain (whole) | 3.0 |
| Spinal Cord Pool | 3.6 |
| Adrenal Gland | 4.5 |
| Pituitary gland Pool | 1.0 |
| Salivary Gland | 0.9 |
| Thyroid (female) | 0.5 |
| Pancreatic ca. CAPAN2 | 27.9 |
| Pancreas Pool | 3.6 |

[0431] TABLE B14
Panel 5 Islet

| | Rel. Exp. (%) |
|---|---|
| | Ag6328, Run |
| Tissue Name | 259232256 |
| 97457_Patient-02go_adipose | 19.6 |
| 97476_Patient-07sk_skeletal muscle | 25.0 |
| 97477_Patient-07ut_uterus | 8.4 |
| 97478_Patient-07pl_placenta | 26.8 |
| 99167_Bayer Patient 1 | 91.4 |
| 97482_Patient-08ut_uterus | 6.7 |
| 97483_Patient-08pl_placenta | 4.3 |
| 97486_Patient-09sk_skeletal muscle | 1.7 |
| 97487_Patient-09ut_uterus | 6.9 |
| 97488_Patient-09pl_placenta | 5.0 |
| 97492_Patient-10ut_uterus | 19.6 |
| 97493_Patient-10pl_placenta | 26.8 |
| 97495_Patient-11go_adipose | 10.7 |
| 97496_Patient-11sk_skeletal muscle | 4.2 |
| 97497_Patient-11ut_uterus | 14.8 |
| 97498_Patient-11pl_placenta | 10.2 |
| 97500_Patient-12go_adipose | 29.1 |
| 97501_Patient-12sk_skeletal muscle | 10.0 |
| 97502_Patient-12ut_uterus | 21.2 |
| 97503_Patient-12pl_placenta | 12.3 |
| 94721_Donor 2 U - A_Mesenchymal Stem Cells | 38.4 |
| 94722_Donor 2 U - B_Mesenchymal Stem Cells | 32.3 |
| 94723_Donor 2 U - C_Mesenchymal Stem Cells | 27.4 |
| 94709_Donor 2 AM - A_adipose | 15.3 |
| 94710_Donor 2 AM - B_adipose | 18.3 |
| 94711_Donor 2 AM - C_adipose | 15.3 |
| 94712_Donor 2 AD - A_adipose | 12.9 |
| 94713_Donor 2 AD - B_adipose | 19.2 |
| 94714_Donor 2 AD - C_adipose | 23.8 |
| 94742_Donor 3 U - A_Mesenchymal Stem Cells | 17.6 |
| 94743_Donor 3 U - B_Mesenchymal Stem Cells | 28.1 |
| 94730_Donor 3 AM - A_adipose | 25.3 |
| 94731_Donor 3 AM - B_adipose | 22.4 |
| 94732_Donor 3 AM - C_adipose | 24.0 |
| 94733_Donor 3 AD - A_adipose | 26.4 |
| 94734_Donor 3 AD - B_adipose | 13.7 |
| 94735_Donor 3 AD - C_adipose | 23.5 |
| 77138_Liver_HepG2untreated | 43.5 |
| 73556_Heart_Cardiac stromal cells (primary) | 77.4 |
| 81735_Small Intestine | 21.8 |
| 72409_Kidney_Proximal Convoluted Tubule | 29.5 |
| 82685_Small intestine_Duodenum | 5.1 |
| 90650_Adrenal_Adrenocortical adenoma | 13.3 |
| 72410_Kidney_HRCE | 100.0 |
| 72411_Kidney_HRE | 39.5 |
| 73139_Uterus_Uterine smooth muscle cells | 12.9 |

[0432] TABLE B15
General_screening_panel_v1.6

| Tissue Name | A |
|---|---|
| Adipose | 3.7 |
| Melanoma* Hs688(A).T | 6.9 |
| Melanoma* Hs688(B).T | 7.0 |
| Melanoma* M14 | 21.5 |
| Melanoma* LOXIMVI | 9.6 |
| Melanoma* SK-MEL-5 | 10.6 |
| Squamous cell carcinoma SCC-4 | 13.8 |
| Testis Pool | 1.2 |
| Prostate ca.* (bone met) PC-3 | 3.7 |
| Prostate Pool | 1.7 |
| Placenta | 3.1 |
| Uterus Pool | 0.4 |
| Ovarian ca. OVCAR-3 | 6.3 |
| Ovarian ca. SK-OV-3 | 29.3 |
| Ovarian ca. OVCAR-4 | 9.6 |
| Ovarian ca. OVCAR-5 | 23.0 |
| Ovarian ca. IGROV-1 | 25.7 |
| Ovarian ca. OVCAR-8 | 13.4 |
| Ovary | 1.4 |
| Breast ca. MCF-7 | 7.4 |
| Breast ca. MDA-MB-231 | 21.6 |
| Breast ca. BT 549 | 100.0 |
| Breast ca. T47D | 11.7 |
| Breast ca. MDA-N | 11.7 |
| Breast Pool | 1.9 |
| Trachea | 1.7 |
| Lung | 1.0 |
| Fetal Lung | 5.4 |
| Lung ca. NCI-N417 | 5.7 |
| Lung ca. LX-1 | 8.2 |
| Lung ca. NCI-H146 | 1.7 |
| Lung ca. SHP-77 | 17.2 |
| Lung ca. A549 | 81.2 |
| Lung ca. NCI-H526 | 2.0 |
| Lung ca. NCI-H23 | 4.3 |
| Lung ca. NCI-H460 | 10.2 |
| Lung ca. HOP-62 | 6.8 |
| Lung ca. NCI-H522 | 2.8 |
| Liver | 0.2 |
| Fetal Liver | 3.1 |
| Liver ca. HepG2 | 4.6 |
| Kidney Pool | 3.2 |
| Fetal Kidney | 1.3 |
| Renal ca. 786-0 | 11.0 |
| Renal ca. A498 | 28.5 |
| Renal ca. ACHN | 15.9 |
| Renal ca. UO-31 | 16.0 |
| Renal ca. TK- 10 | 7.4 |
| Bladder | 2.6 |
| Gastric ca. (liver met.) NCI-N87 | 3.1 |
| Gastric ca. KATO III | 25.3 |
| Colon ca. SW-948 | 6.2 |
| Colon ca. SW480 | 16.2 |
| Colon ca.* (SW480 met) SW620 | 5.3 |
| Colon ca. HT29 | 10.7 |
| Colon ca. HCT-116 | 24.5 |
| Colon ca. CaCo-2 | 12.9 |
| Colon cancer tissue | 7.3 |
| Colon ca. SW1116 | 5.4 |
| Colon ca. Colo-205 | 6.4 |
| Colon ca. SW-48 | 3.6 |
| Colon Pool | 1.6 |
| Small Intestine Pool | 1.3 |
| Stomach Pool | 1.4 |
| Bone Marrow Pool | 1.1 |
| Fetal Heart | 0.4 |
| Heart Pool | 0.7 |
| Lymph Node Pool | 1.8 |
| Fetal Skeletal Muscle | 0.9 |
| Skeletal Muscle Pool | 0.2 |
| Spleen Pool | 1.8 |
| Thymus Pool | 2.3 |
| CNS cancer (glio/astro) U87-MG | 14.0 |
| CNS cancer (glio/astro) U-118-MG | 9.5 |
| CNS cancer (neuro; met) SK-N-AS | 5.4 |
| CNS cancer (astro) SF-539 | 8.2 |
| CNS cancer (astro) SNB-75 | 92.0 |
| CNS cancer (glio)SNB- 19 | 27.2 |
| CNS cancer (glio) SF-295 | 13.3 |
| Brain (Amygdala) Pool | 2.2 |
| Brain (cerebellum) | 6.3 |
| Brain (fetal) | 3.3 |
| Brain (Hippocampus) Pool | 3.0 |
| Cerebral Cortex Pool | 3.0 |
| Brain (Substantia nigra) Pool | 2.2 |
| Brain (Thalamus) Pool | 4.5 |
| Brain (whole) | 2.9 |
| Spinal Cord Pool | 3.5 |
| Adrenal Gland | 3.3 |
| Pituitary gland Pool | 1.1 |
| Salivary Gland | 0.9 |
| Thyroid (female) | 1.9 |
| Pancreatic ca. CAPAN2 | 15.9 |
| Pancreas Pool | 2.7 |

Column A - Rel. Exp. (%) Ag6328, Run 277234226

[0433] General screening panel v1.5 Summary: Transketolase is abundantly expressed in all tissues. Transketolase is highly expressed in adipose (CT=27.42), which is the target tissue.

[0434] Panel 5 Islet Summary: Panel 5I shows the highest expression in placenta with a good expression in adipose tissue and supports the data of panel 1.5.

[0435] General screening panel v1.6 Summary: (Ag6328) High expression of this gene was detected ubiquitously in all tissues (CT=26-30). This ubiquitous pattern of expression indicates that this gene product is involved in homeostatic processes for these and other cell types and tissues.

[0436] Its expression was elevated in all the cancer cell lines (melanoma, ovarian cancer, breast cancer, lung cancer, renal cancer, pancreatic cancer, and CNS cancer) with CT=22-26. Therapeutic modulation of this gene, expressed protein and/or use of antibodies or small molecule drugs targeting the gene or gene product are useful in the treatment of melanoma, ovarian cancer, breast cancer, lung cancer, renal cancer, pancreatic cancer, and CNS cancer. In addition, the expression of this gene can be used as a detection marker for those cancers. This gene was highly expressed in adipose tissue (CT27.42). Therapeutic modulation of this gene, expressed protein and/or use of antibodies or small molecule drugs targeting the gene or gene product are useful in the treatment of obesity and diabetes.

### EXAMPLE B5

### PathCalling®

[0437] PathCalling® screening showed that Transketolase (TKT) interacts with transcriptional factor (TIF1) and the extracellular domain of semaforin (CG51896-04, See Table EB5). Both interactions have been detected several times in the screening process with different libraries. Protocol for PathCalling® technoogy is disclosed in Example Q10.

TABLE EB5

(SEQ ID NO:221)

CG51896-04-prot 1047 aa
MRSEALLLYFTLLHFAGAGFPEDSEPISISHCNYTKQYPVFVGHKPGRNTTQRHRLDIQM
IMIMNGTLYIAARDHIYTVDIDTSHTEEIYCSKKLTWKSRQADVDTCRMKGKHKDECHNF
IKVLLKKNDDALFVCGTNAFNPSCRNYKMDTLEPFGDEFSGMARCPYDAKHANVALFADG
KLYSATVTDFLAIDAVIYRSLGESPTLRTVKHDSKWLKEPYFVQAVDYGDYIYFFFREIA
VEYNTMGKVVFPRVAQVCKNDMGGSQRVLEKQWTSFLKARLNCSVPGDSHFYFNILQAVT
DVIRINGRDVVLATFSTPYNSIPGSAVCAYDMLDIASVFTGRFKEQKSPDSTWTPVPDER
VPKPRPGCCAGSSSLERYATSNEFPDDTLNFIKTHPLMDEAVPSIFNRPWFLRTMVRYRL
TKIAVDTAAGPYQNHTVVFLGSEKGIILKFLARIGNSGFLNDSLFLEEMSVYNSEKCSYD
GVEDKRIMGMQLDRASSSLYVAFSTCVIKVPLGRCERHGKGKKTGIASRDPYCGWIKEGG
ACSHLSPNSRLTFEQDIERGNTDGLGDCHNSFVALNDISTPLPDNEMSYNTVYGHSSSLL
PSTTTSDSTAQEGYESRGGMLDWKHLLDSPDSTDPLGAVSSHNHQDKKGVIRESYLKGHD
QLVPVTLLAIAVILAFVMGAVFSGITVYCVCDHRRKDVAVVQRKEKELTHSRRGSMSSVT
KLSGLFGDTQSKDPKPEAILTPLMHNGKLATPGNTAKMLIKADQHHLDLTALPTPESTPT
LQQKRKPSRGSREWERNQNLINACTKDMPPMGSPVIPTDLPLRASPSHIPSVVVLPITQQ
GYQHEYVDQPKMSEVAQMALEDQAATLEYKTIKEHLSSKSPNHGVNLVENLDSLPPKVPQ
REASLGPPGASLSQTGLSKRLEMHHSSSYGVDYKRSYPTNSLTRSHQATTLKRNNTNSSN
SSHLSRNQSFGRGDNPPPAPQRVDSIQVHSSQPSGQAVTVSRQPSLNAYNSLTRSGLKRT
PSLKPDVPPKPSFAPLSTSMKPNDACT

### EXAMPLE B6

### Assays Screening for Modulators of Transketolase

[0438] A non-exhaustive list of cell lines that express the Transketolase gene can be obtained from the RTQ-PCR results shown herein. These and other Transketolase expressing cell lines could be used for screening purposes.

[0439] Screening for a modulator of Transketolase may be accomplished by measurement of generated NADPH from the reaction in which Transketolase participates as outlined above. Additionally, Transketolase activity could be measured by a method outlined in Frank et al, High thiamine diphosphate concentrations in erythrocytes can be achieved in dialysis patients by oral administration of benfontiamine, Eur J Clin Pharmacol. 2000 June; 56 (3):251-7).

[0440] Functional/mechanistic assay for the effectiveness of the modulator of Transketolase can be performed by measurement of effect of transketolase 1 inhibitors on TG synthesis/accumulation in 3T3-L1 mouse adipocytes, human adipocytes or hepatocytes by Oil Red 0 staining. Alternatively measurement could be made of post treatment TG accumulation in cells transfected with Transketolase 1.

[0441] Our results indicate that a modulator of Transketolase activity, such as an inhibitor, activator, antagonist, or agonist of Transketolase may be useful for treatment of such disorders as obesity, diabetes, and insulin resistance, as well as for enhancement of insulin secretion.

C. NOV3—Long Chain Fatty Acyl Elongase

[0442] Long chain fatty acyl elongase (LCE) is an enzyme that uses malonyl-CoA as a 2-carbon donor for elongation of the 16-carbon fatty acid palmitic acid to the 18-carbon fatty acid stearic acid. The elongation of fatty acids occurs in the endoplasmic reticulum, where each 2-carbon addition requires 4 sequential reactions: (1) condensation between a fatty acyl-CoA and malonyl-CoA to form a 3-ketoacyl-CoA, (2) reduction of the 3-ketoacyl-CoA using NADPH to form a 3-hydroxyacyl-CoA, (3) dehydration of the 3-hydroxyacyl-CoA to trans-2-enoyl-CoA, and (4) reduction of the trans-2-enoyl-CoA to the saturated acyl-CoA. It has been shown that LCE is essential for the condensation step of fatty acid elongation, which is the rate-limiting step. LCE is regulated by SREBP, as are many enzymes in fatty acid synthesis and lipogenesis (Moon Y A, Shah N A, Mohapatra S, Warrington J A, Horton J D. Identification of a mammalian long chain fatty acyl elongase regulated by sterol regulatory element-binding proteins J Biol Chem 2001 Nov. 30; 276 (48):45358-66. PMID: 11567032).

[0443] We found LCE to be down-regulated in brown adipose tissue from mice on a high fat diet with various body weights, ranging from obese (sd4 compared to chow-fed mice), heavily obese (sd7 compared to chow-fed mice), and hyperglycemic, heavily obese mice (sd7+compared to chow-fed mice). However, LCE remained unchanged in white adipose from the same groups of mice. This down-regulation of LCE is in conjunction with a down-regulation of several enzymes in the fatty acid synthesis pathway and the anaplerotic pathway, including ATP citrate lyase, transketolase, malic enzyme, and SREBP. This suggests that in brown adipose, fatty acid synthesis and lipogenesis are down-regulated in compensation to the high fat diet. Such a compensatory mechanism is not present in white adipose. It has been clearly shown in the literature that long chain fatty acids are oxidized less than short chain fatty acids (DeLany J P, Windhauser M M, Champagne C M, Bray G A. Differential oxidation of individual dietary fatty acids in humans. Am J Clin Nutr. 2000 October; 72 (4):905-11. PMID: 11010930) and that they are more prone to be retained in muscle and liver, which may contribute to insulin resistance (Bessesen D H, Vensor S H, Jackman M R. Trafficking of dietary oleic, linolenic, and stearic acids in fasted or fed lean rats. Am J Physiol Endocrinol Metab. 2000 June; 278 (6):E1124-32. PMID: 10827016). Therefore, mimicking brown adipose in white adipose, by inhibiting LCE, will decrease the amount of long chain fatty acids and therefore, potentially promote more fatty acid oxidation of short chain fatty acids.

[0444] Thus, a modulator of LCE such as an antagonist or inhibitor for LCE may be beneficial for the treatment of obesity and/or diabetes. Potential assays are used to screen for antibody therapeutics or small molecule drugs associated with the human Long Chain Fatty Acyl Elongase that are useful to treat obesity and/or diabetes. In a screening assay for inhibitors of LCE, radiolabelled malonyl-CoA plus palmitate will yield radiolabelled stearate that can be detected by partition assay. A non-exhaustive list of cell lines that express the long chain fatty acyl elongase can be obtained from the differential gene expression (RTQ-PCR) results presented herein. These and other Long Chain Fatty Acyl Elongase expressing cell lines could be used for screening purposes.

[0445] Furthermore, our results indicate that a modulator of Long Chain Fatty Acyl Elongase activity, such as an inhibitor, activator, antagonist, or agonist of Long Chain Fatty Acyl Elongase may be useful for treatment of such disorders as obesity, diabetes, and insulin resistance, as well as for enhancement of insulin secretion.

Discovery Process

[0446] The following sections describe the study designs and the techniques used to identify the Long Chain Fatty Acyl Elongase-encoded protein and any variants, thereof, as being suitable as diagnostic markers, targets for an antibody therapeutic and targets for a small molecule drugs for Obesity and/or Diabetes.

### EXAMPLE C1

### Mouse Dietary-Induced Obesity

[0447] A protocol for Mouse Dietary-Induced Obesity study is disclosed in Example Q1.

[0448] The predominant cause for obesity in clinical populations is excess caloric intake. This so-called diet-induced obesity (DIO) is mimicked in animal models by feeding high fat diets of greater than 40% fat content. The DIO study was established to identify the gene expression changes contributing to the development and progression of diet-induced obesity. In addition, the study design sought to identify the factors that lead to the ability of certain individuals to resist the effects of a high fat diet and thereby prevent obesity. The sample groups for the study had body weights +1 S.D., +4 S.D. and +7 S.D. of the chow-fed controls. In addition, the biochemical profile of the +7 S.D. mice revealed a further stratification of these animals into mice that retained a normal glycemic profile in spite of obesity and mice that demonstrated hyperglycemia. Tissues examined included hypothalamus, brainstem, liver, retroperitoneal white adipose tissue (WAT), epididymal WAT, brown adipose tissue (BAT), gastrocnemius muscle (fast twitch skeletal muscle) and soleus muscle (slow twitch skeletal muscle). The differential gene expression profiles for these tissues revealed genes and pathways that can be used as therapeutic targets for obesity. Protocol for differential gene expression analysis, GeneCalling®, is disclosed in Example Q7.

Results

[0449] A fragment of the mouse (mouse strain C57BL/6J) Long Chain Fatty Acyl Elongase (LCE) gene was initially found to be down-regulated by 2-fold in the brown adipose tissue of obese mice on a high fat diet (sd4) relative to normal weight mice (chow-fed) using CuraGen's GeneCalling® method of differential gene expression. A differentially expressed mouse gene fragment migrating, at approximately 285 nucleotides in length was definitively identified as a component of the mouse Long Chain Fatty Acyl Elongase cDNA. The method of competitive PCR was used for confirmation of the gene assessment. The electropherographic peaks corresponding to the gene fragment of the mouse Long Chain Fatty Acyl Elongase were ablated when a gene-specific primer (shown in Table C1) competes with primers in the linker-adaptors during the PCR amplification. The peaks at 285 nt in length were ablated in the sample from both the brown adipose tissue of obese mice on a high fat diet (sd4) and the normal weight mice (chow-fed). In addition, LCE was found to be down-regulated in brown adipose tissue of hyperinsulinemic (ngsd7) and hyperglycemic obese mice on a high fat diet compared to normal weight mice (chow-fed).

TABLE C1

The direct sequence of the 285 nucleotide-long gene fragment and the
gene-specific primers used for competitive PCR are indicated on the
cDNA sequence of the Long Chain Fatty Acyl Elongase fragment (SEQ ID
NO:183) are shown in bold. The gene-specific primers at the 5′ and 3′
ends of the fragment are underlined.
Gene Sequence (fragment from 5292 to 5576 in bold. band size: 285)

4811 CACACAGCTC CCATTTCCTG GTGCCTGAGA TCCCAGCCAT CAGAAAGTGA TTTGGGTGAG
4871 AATTCACAAC ATATATGTCA CCTCTGCATA TTGAAGTGAC ATCTAATAAA ACAAGGACGT
4931 CCTATTTTGT CTGAACCCGC TGAATGAAGC TCTGTTATCC TAGTTAGTCA TTGGGCCGCC
4991 ATCCTCTGTA CCCGATAGTG ACACAAAACA GATGTCGGTG CCTGTACAAG AATTCTCAGT
5051 GCCTGTTGTG ACAGACTGTG CTTAGAAGAA ACATTCGTGA GCCATAAAGC AGGAACCACA
5111 GATGAAAGGG CCAGTTAAAA GTCCACCTGC TCCAAGTATC ATAGAAAACC CAAAAGCCTG
5171 TTGTATAATC TGGTATTGTC CCCATCCCCA GATGCTTTGA AAACTAGGAT TCTCAGAGCA
5231 TGGATACCCA CGCTTCCATC TTCCCACAAA CATTTCCTAG AGTTGTACTG GTGGGTGCAG
5291 CCCTAGGTGG TTGGTTGGGG GAAGTCTTGG AAGCTGTACT TTGATTGCAG GTCAAGCAAA
5351 GCCAAATCCA GATATTTCTG TGTCACTCAC CAGTTGTCCA TGTCCACCCA CAAAACAATT
5411 GTATTATAGT CAAGTTGTCC TAGCTGATTG GTCCTCAAAT AAGGATGCAA CTATGTTTGC
5471 AACCCAGTTA GGACACATTT GAAAGAACCT GACTCACTAG CATCTAAACA ATATCATTTC
5531 CCCAATGCTT GGTGGCACTT CAGACTTTTG TTCTCCTGGT TGATCAAGGT GTTGCCTGGT
5591 GGTGCCGCCT CCTAGTGTGA ATATTTCAGT TAAGTGTGGG TCTGAGCATG ACCGGGCTGG
5651 GCTTAGCTCA CTGCTACTTG GAAAATGACT GGCATTCTGC TTCCTAGGCC CTAAACCCAT
5711 ATTCAGAGGG AAAATTCACT ATCAAGCCTC ACAGCGAAAT CACAGCAGTG TTGGAATTCT
5771 TATTTTCAAG TGCTTATCTC ACAACATTGA AAAATATTTT TGGTGTATTA AGATTTAAAA
5831 TAAAGTCATC ATAAACTTTT GAATTTAAAA AAAAAAAAAA AAAAAAAAAA AAAAAAAAAA
5891 AA

(gene length is 5892, only region from 4811 to 5892 shown)

### EXAMPLE C2

### Identification of Human Long Chain Fatty Acyl Elongase Sequences

[0450] The sequence of Human Long Chain Fatty Acyl Elongase (Acc. No. CG180320-01) was derived by laboratory cloning of cDNA fragments, by in silico prediction of the sequence. cDNA fragments covering either the full length of the DNA sequence, or part of the sequence, or both, were cloned. In silico prediction was based on sequences available in CuraGen's proprietary sequence databases or in the public human sequence databases, and provided either the full-length DNA sequence, or some portion thereof. The protocol for identification of human sequence(s) is disclosed in Example Q8.

[0451] Table C2 shows protein alignment (ClustalW) of Human Long Chain Fatty Acyl Elongase Protein Sequence (CG 180320-01; SEQ ID NO:18) against Mouse Long Chain Fatty Acyl Elongase (Q920L5; SEQ ID NO:184) and Rat Long Chain Fatty Acyl Elongase (Q920L6; SEQ ID NO:185). Table C3 shows sequences of Mouse Long Chain Fatty Acyl Elongase (Q920L5; SEQ ID NO:184) and Rat Long Chain Fatty Acyl Elongase (Q920L6; SEQ ID NO:185).

[image]

TABLE C3

Sequences of Mouse Long Chain Fatty Acyl Elongase (Q920L5; SEQ ID
NO: 184) and Rat Long Chain Fatty Acyl Elongase (Q920L6; SEQ ID NO:
185).

Mouse Long Chain Fatty Acyl Elongase (Q920L5; SEQ ID NO:184)
MNMSVLTLQEYEFEKQFNENEAIQWMQENWKKSFLFSALYAAFLFGGRHLMNKRAKFELRKPLVLWSLTL
AVFSLFGALRTGAYMLYILMTKGLKQSVCDQSFYNGPVSKFWAYAFVLSKAPELGDTLFILLRKQKLIFL
HWYHHITVLLYSWYSYKDMVAGGGWFMTMNYGVHAVMYSYYALRAAGFRVSRKFAMFITLSQITQMLMGC
VINYLVFNWMQHDNDQCYSHFQNIFWSSLMYLSYLVLFCHFFFEAYIGKVKKATKAE
Rat Long Chain Fatty Acyl Elongase (Q920L6; SEQ ID NO:185)
MNMSVLTLQEYEFEKQFNENEAIQWMQENWKKSFLFSALYAAFIFGGRHLMNKRAKFELRKPLVLWSLTL
AVFSLFGALRTGAYMLYILMTKGLKQSVCDQSFYNGPVSKFWAYAFVLSKAPELGDTIFILLRKQKLIFL
HWYHHITVLLYSWYSYKDMVAGGGWFMTMNYGVHAVMYSYYALRAAGFRVSRKFAMFITLSQITQMLMGC
VINYLVFNWMQHDNDQCYSHFQNIFWSSLMYLSYLLLFCHFFFEAYIGKVKKATKAE

[0452] The laboratory cloning was performed using one or more of the methods summarized in Example Q8. The NOV3 clone was analyzed, and the nucleotide and encoded polypeptide sequences are shown in Table C4.

TABLE C4
NOV3 Sequence Analysis

| | | |
|---|---|---|
| NOV3a, CG180320-01 | SEQ ID NO:17 | 3047 bp |
| DNA Sequence | ORF Start: ATG at 281 | ORF Stop: TAG at 1076 |

ACTAAGACCGCAAGGCATTCATTTCCTCCTACGGTGGATGCGGACGCCGGGAGGAGGAGAGCCCCAGA
GAGAGGAGCTGGGAGCGGAGGCGCAGGCAATGCTCAGCCCTGGATGTAGCTGAGAGGCTGGGAGAAGA
GACGACCGCTGGAGACCGAGCGGCGTGGGGAAGACCTAGGGGGGTGGGTGGGGGAAGCAGACAGGAGA
ACACTCGAAATCAAGCGCTTTACAGATTATTTTATTTTGTATAGAGAACACGTAGCGACTCCGAAGAT
CAGCCCCAATGAACATGTCAGTGTTGACTTTACAAGAATATGAATTCGAAAAGCAGTTCAACGAGAAT
GAAGCCATCCAATGGATGCAGGAAAACTGGAAGAAATCTTTCCTGTTTTCTGCTCTGTATGCTGCCTT
TATATTCGGTGGTCGGCACCTAATGAATAAACGAGCAAAGTTTGAACTGAGGAAGCCATTAGTGCTCT
GGTCTCTGACCCTTGCAGTCTTCAGTATATTCGGTGCTCTTCGAACTGGTGCTTATATGGTGTACATT
TTGATGACCAAAGGCCTGAAGCAGTCAGTTTGTGACCAGGGTTTTTACAATGGACCTGTCAGCAAATT
CTGGGCTTATGCATTTGTGCTAAGCAAAGCACCCGAACTAGGAGATACAATATTCATTATTCTGAGGA
AGCAGAAGCTGATCTTCCTGCACTGGTATCACCACATCACTGTGCTCCTGTACTCTTGGTACTCCTAC
AAAGACATGGTTGCCGGGGGAGGTTGGTTCATGACTATGAACTATGGCGTGCACGCCGTGATGTACTC
TTACTATGCCTTGCGGGCGGCAGGTTTCCGAGTCTCCCGGAAGTTTGCCATGTTCATCACCTTGTCCC
AGATCACTCAGATGCTGATGGGCTGTGTGGTTAACTACCTGGTCTTCTGCTGGATGCAGCATGACCAG
TGTCACTCTCACTTTCAGAACATCTTCTGGTCCTCACTCATGTACCTCAGCTACCTTGTGCTCTTCTG
CCATTTCTTCTTTGAGGCCTACATCGGCAAAATGAGGAAAACAACGAAAGCTGAATAGTGTTGGAACT
GAGGAGGAAGCCATAGCTCAGGGTCATCAAGAAAAATAATAGACAAAAGAAAATGGCACAAGGAATCA
CACGTGGTGCAGCTAAAACAAAACAAAACATGAGCAAACACAAAACCCAAGGCAGCTTAGGGATAATT
AGGTTGATTTAACCCAGTAAGTTTATGATCCTTTTAGGGTGAGGACTCACTGAGTGCACCTCCATCTC
CAAGCACTGCTGCTGGAAGACCCCATTCCCTCTTTATCTATCAACTCTAGGACAAGGGAGAACAAAAG
CAAGCCAGAAGCAGAGGAGACTAATCAAAGGCAAACAAAGGCTATTAACACATAGGAAAATATGTATT
TACTAAGTGTCACATTTCTCTAAGATGAAAGATTTTTACTCTAGAAACTGTGCGAGCACAACACACAC
AATCCTTTCTAACTTTATGGACACTAAACTGGAGCCAATAGAAAAGACAAAAATGAAAGAGACACAGG
GTGTATATCTAGAACGATAATGCTTTTGCAGAAACTAAAGCCTTTTTAAGAAATGCCAGCTGCTGTAG
ACCCCATGAGAAAAGATGTCTTAATCATCCTTATGAAAACAGATGTAAACAACTATATTTCAACTAAC
TTCATCTTCACTGCATAGCCTCAGGCTAGTGAGTTTGCCAAAACCAAAGGGGGTGAATACTTCCCCAA
GATTCTTCCTGGGAGGATGGAAACAGTGCAGCCCAGGTCCCATGGGGGCAGCTCCATCCCAGAGCATT
TCTGATAGTTGAACTGTAATTTCTACTCTTAAGTGAGATATGAAGTATTATCCTTTTGTTCAGTTGCC
CCGGGCTTTTGAACAGAAGAGTAAATACAGAATTGAAAAAGATAAACACTCAACCAAACAATGTGAAA
ACGGGTTCTGTAGTATTTGTAAAAAGGCCCGGCCCAGGACCACTGTGAGCTGGAAAAGGGAGAAAGGC
AGTGGGAAAAGAGGTGAGCCGAAGATCAATTCGACAGACAGACGGTGTGTATGCCCCTCCCTGTTTGA
CTTCACACACACTCATAACTTTCCAAATGAAACCCCACAGTATAGCGCATATTTTCGATATTTTTGTG
AATTCCAAAAGGAAATCACAGGGCTGTTCGAAATATTGGGGGAACACTGTGTTTCTGCATCATCTGCA
TTTGCTCCCCAAGCAATGTAGAGGTGTTTAAAGGGCCCTCTGCTGGCTGAGTGGCAATACTACAACAA
ACTTCAAGGCAAGTTTGGCTGAAAACAGTTGACAACAAAGGGCCCCCATACACTTATCCCTCAAATTT
TAAGTGATATGAAATACTTGTCATGTCTTTGGCCAAATCAGAAGATATTCATCCTGCTTCAAGTCAGC
TTCAGAAATGTTTTAAAAGGGACTTTAGCTCTGGAACTCAAAATCAATTTATTAAGAGCCATATTCTT
TAAAAAAAAAAGCTGGATAATATTATCTGTAATATTTCAGTCCTTTACAAGCCAAATACATGTGTCAA
TGTTTCTAGTATTTCAAAGAAGCAATTATGTAAAGTTGTTCAATGTGACATAATAGTATTATAATTGG
TTAAGTAGCTTAATGATTAGGCAAACTAGATGAAAAGATTAGGGGCTTCCACACTGCATAGATCACAC
GCACATAGCCACGCATACACACACAGACACACAGATGTGGGGTACACTGAATTTCAAAGCCCAAATGA
ATAGAAACACATTTTCTGGCTAGCAGAAAAAAACAAAACAAAACTGTTGTTTCTCTTTCTTGCTTTGA
GAGTGTACAGTAAAAGGGATTTTTTCGAATTATTTTTATATTATTTTAGCTTTAATTGTGCTGTCGTT
CATGAAACAGAGCTGCTCTGCTTTTCTGTCAGAGATGGCAAGGGCTTTTTCAGCATCTCGTTTATGTG
TGGAATTTAAAAAGAATAAAGTTTTATTCCATTCTGAAAAAAAAAAAAAAAAAGC

| | | | |
|---|---|---|---|
| NOV3a, GG180320-01 | | | |
| Protein Sequence | SEQ ID NO:18 | 265 aa | MW at 31375.7 kD |

MNMSVLTLQEYEFEKQFNENEAIQWMQENWKKSFLFSALYAAFIFGGRHLMNKRAKFELRKPLVLWSL
TLAVFSIFGALRTGAYMVYILMTKGLKQSVCDQGFYNGPVSKFWAYAFVLSKAPELGDTIFIILRKQK
LIFLHWYHHITVLLYSWYSYKDMVAGGGWFMTMNYGVHAVMYSYYALRAAGFRVSRKFAMFITLSQIT
QMLMGCVVNYLVFCWMQHDOCHSHFQNIFWSSLMYLSYLVLFCHFFFEAYIGKMRKTTKAE

| | | |
|---|---|---|
| NOV3b, GG180320-02 | SEQ ID NO:19 | 822 bp |
| DNA Sequence | ORF Start: at 2 | ORF Stop: TAG at 809 |

CACCGGATCCACCATGAACATGTCAGTGTTGACTTTACAAGAATATGAATTCGAAAAGCAGTTCAACG
AGAATGAAGCCATCCAATGGATGCAGGAAAACTGGAAGAAATCTTTCCTGTTTTCTGCTCTGTATGCT
GCCTTTATATTCGGTGGTCGGCACCTAATGAATAAACGAGCAAAGTTTGAACTGAGGAAGCCATTAGT
GCTCTGGTCTCTGACCCTTGCAGTCTTCAGTATATTCGGTGCTCTTCGAACTGGTGCTTATATGGTGT
ACATTTTGATGACCAAAGGCCTGAAGCAGTCAGTTTGTGACCAGGGTTTTTACAATGGACCTGTCAGC
AAATTCTGGGCTTATGCATTTGTGCTAAGCAAAGCACCCGAACTAGGAGATACAATATTCATTATTCT
GAGGAAGCAGAAGCTGATCTTCCTGCACTGGTATCACCACATCACTGTGCTCCTGTACTCTTGGTACT
CCTACAAAGACATGGTTGCCGGGGGAGGTTGGTTCATGACTATGAACTATGGCGTGCACGCCGTGATG
TACTCTTACTATGCCTTGCGGGCGGCAGGTTTCCGAGTCTCCCGGAAGTTTGCCATGTTCATCACCTT
GTCCCAGATCACTCAGATGCTGATGGGCTGTGTGGTTAACTACCTGGTCTTCTGCTGGATGCAGCATG
ACCAGTGTCACTCTCACTTTCAGAACATCTTCTGGTCCTCACTCATGTACCTCAGCTACCTTGTGCTC
TTCTGCCATTTCTTCTTTGAGGCCTACATCGGCAAAATGAGGAAAACAACGAAAGCTGAATAGGCGGC
CGCTAT

| | | | |
|---|---|---|---|
| NOV3b, CG180320-02 | | | |
| Protein Sequence | SEQ ID NO:20 | 269 aa | MW at 31722.1 kD |

TGSTMNMSVLTLQEYEFEKQFNENEAIQWMQENWKKSFLFSALYAAFIFGGRHLMNKRAKFELRKPLV
LWSLTLAVFSIFGALRTGAYMVYILMTKGLKQSVCDQGFYNGPVSKFWAYAFVLSKAPELGDTIFIIL
RKQKLIFLHWYHHITVLLYSWYSYKDMVAGGGWFMTMNYGVHAVMYSYYALRAAGFRVSRKFAMFITL
SQITQMLMGCVVNYLVFCWNQHDQCHSHFQNIFWSSLMYLSYLVLFCHFFFEAYIGKMRKTTKAE

| | | |
|---|---|---|
| NOV3c, CG180320-03 | SEQ ID NO:21 | 834 bp |
| DNA Sequence | ORF Start: at 1 | ORF Stop: TAG at 793 |

AACATGTCAGTGTTGACTTTACAAGAATATGAATTCGAAAAGCAGTTCAACGAGAATGAAGCCATCCA
ATGGATGCAGGAAAACTGGAAGAAATCTTTCCTGTTTTCTGCTCTGTATGCTGCCTTTATATTCGGTG
GTCGGCACCTAATGAATAAACGAGCAAAGTTTGAACTGAGGAAGCCATTAGTGCTCTGGTCTCTGACC
CTTGCAGTCTTCAGTATATTCGGTGCTCTTCGAACTGGTGCTTATATGGTGTACATTTTGATGACCAA
AGGCCTGAAGCAGTCAGTTTGTGACCAGGGTTTTTACAATGGACCTGTCAGCAAATTCTGGGCTTATG
CATTTGTGCTAAGCAAAGCACCCGAACTAGGAGATACAATATTCATTATTCTGAGGAAGCAGAAGCTG
ATCTTCCTGCACTGGTATCACCACATCACTGTGCTCCTGTACTCTTGGTACTCCTACAAAGACATGGT
TGCCGGGGGAGGTTGGTTCATGACTATGAACTATGGCGTGCACGCCGTGATGTACTCTTACTATGCCT
TGCGGGCGGCAGGTTTCCGAGTCTCCCGGAAGTTTGCCATGTTCATCACCTTGTCCCAGATCACTCAG
ATGCTGATGGGCTGTGTGGTTAACTACCTGGTCTTCTGCTGGATGCAGCATGACCAGTGTCACTCTCA
CTTTCAGAACATCTTCTGGTCCTCACTCATGTACCTCAGCTACCTTGTGCTCTTCTGCCATTTCTTCT
TTGAGGCCTACATCGGCAAAATGAGGAAAACAACGAAAGCTGAATAGGCAGGTGCGGCCGCACTCGAG
CACCACCACCACCACCAC

| | | | |
|---|---|---|---|
| NOV3c, CG 180320-03 | | | |
| Protein Sequence | SEQ ID NO:22 | 264 aa | MW at 31244.5 kD |

NMSVLTLQEYEFEKQFNENEAIQWMQENWKKSFLFSALYAAFIFGGRHLMNKRAKFELRKPLVLWSLT
LAVFSIFGALRTGAYMVYILMTKGLKQSVCDQGFYNGPVSKFWAYAFVLSKAPELGDTIFIILRKQKL
IFLHWYHHITVLLYSWYSYKDMVAGGGWFMTMNYGVHAVMYSYYALRAAGFRVSRKFAMFITLSQITQ
MLMGCVVNYLVFCWMQHDQCHSHFQNIFWSSLMYLSYLVLFCHFFFEAYIGKMRKTTKAE

| | | |
|---|---|---|
| NOV3d, CG180320-04 | SEQ ID NO:23 | 801 bp |
| DNA Sequence | ORF Start: at 1 | ORF Stop: TAG at 799 |

ACCATGAACATGTCAGTGTTGACTTTACAAGAATATGAATTCGAAAAGCAGTTCAACGAGAATGAAGC
CATCCAATGGATGCAGGAAAACTGGAAGAAATCTTTCCTGTTTTCTGCTCTGTATGCTGCCTTTATAT
TCGGTGGTCGGCACCTAATGAATAAACGAGCAAAGTTTGAACTGAGGAAGCCATTAGTGCTCTGGTCT
CTGACCCTTGCAGTCTTCAGTATATTCGGTGCTCTTCGAACTGGTGCTTATATGGTGTACATTTTGAT
GACCAAAGGCCTGAAGCAGTCAGTTTGTGACCAGGGTTTTTACAATGGACCTGTCAGCAAATTCTGGG
CTTATGCATTTGTGCTAAGCAAAGCACCCGAACTAGGAGATACAATATTCATTATTCTGAGGAAGCAG
AAGCTGATCTTCCTGCACTGGTATCACCACATCACTGTGCTCCTGTACTCTTGGTACTCCTACAAAGA
CATGGTTGCCGGGGGAGGTTGGTTCATGACTATGAACTATGGCGTGCACGCCGTGATGTACTCTTACT
ATGCCTTGCGGGCGGCAGGTTTCCGAGTCTCCCGGAAGTTTGCCATGTTCATCACCTTGTCCCAGATC
ACTCAGATGCTGATGGGCTGTGTGGTTAACTACCTGGTCTTCTGCTGGATGCAGCATGACCAGTGTCA
CTCTCACTTTCAGAACATCTTCTGGTCCTCACTCATGTACCTCAGCTACCTTGTGCTCTTCTGCCATT
TCTTCTTTGAGGCCTACATCGGCAAAATGAGGAAAACAACGAAAGCTGAATAG

| | | | |
|---|---|---|---|
| NOV3d, CG180320-04 | | | |
| Protein Sequence | SEQ ID NO:24 | 266 aa | MW at 31476.8 kD |

TMNMSVLTLQEYEFEKQFNENEAIQWMQENWKKSFLFSALYAAFIFGGRHLMNKRAKFELRKPLVLWS
LTLAVFSIFGALRTGAYMVYILMTKGLKQSVCDQGFYNGPVSKFWAYAFVLSKAPELGDTIFIILRKQ
KLIFLHWYHHITVLLYSWYSYKDMVAGGGWFMTMNYGVHAVMYSYYALRAAGFRVSRKFAMFITLSQI
TQMLMGCVVNYLVFCWMQHDQCHSHFQNIFWSSLMYLSYLVLFCHFFFEAYIGKMRKTTKAE

| | | |
|---|---|---|
| NOV3e, 305263028 | SEQ ID NO:25 | 834 bp |
| DNA Sequence | ORF Start: at 1 | ORF Stop: TAG at 793 |

AACATGTCAGTGTTGACTTTACAAGAATATGAATTCGAAAAGCAGTTCAACGAGAATGAAGCCATCCA
ATGGATGCAGGAAAACTGGAAGAAATCTTTCCTGTTTTCTGCTCTGTATGCTGCCTTTATATTCGGTG
GTCGGCACCTAATGAATAAACGAGCAAAGTTTGAACTGAGGAAGCCATTAGTGCTCTGGTCTCTGACC
CTTGCAGTCTTCAGTATATTCGGTGCTCTTCGAACTGGTGCTTATATGGTGTACATTTTGATGACCAA
AGGCCTGAAGCAGTCAGTTTGTGACCAGGGTTTTTACAATGGACCTGTCAGCAAATTCTGGGCTTATG
CATTTGTGCTAAGCAAAGCACCCGAACTAGGAGATACAATATTCATTATTCTGAGGAAGCAGAAGCTG
ATCTTCCTGCACTGGTATCACCACATCACTGTGCTCCTGTACTCTTGGTACTCCTACAAAGACATGGT
TGCCGGGGGAGGTTGGTTCATGACTATGAACTATGGCGTGCACGCCGTGATGTACTCTTACTATGCCT
TGCGGGCGGCAGGTTTCCGAGTCTCCCGGAAGTTTGCCATGTTCATCACCTTGTCCCAGATCACTCAG
ATGCTGATGGGCTGTGTGGTTAACTACCTGGTCTTCTGCTGGATGCAGCATGACCAGTGTCACTCTCA
CTTTCAGAACATCTTCTGGTCCTCACTCATGTACCTCAGCTACCTTGTGCTCTTCTGCCATTTCTTCT
TTGAGGCCTACATCGGCAAAATGAGGAAAACAACGAAAGCTGAATAGGCAGGTGCGGCCGCACTCGAG
CACCACCACCACCACCAC

| | | | |
|---|---|---|---|
| NOV3e, 305263028 | | | |
| Protein Sequence | SEQ ID NO:26 | 264 aa | MW at 31244.5 kD |

NMSVLTLQEYEFEKQFNENEAIQWMQENWKKSFLFSALYAAFIFGGRHLMNKRAKFELRKPLVLWSLT
LAVFSIFGALRTGAYMVYILMTKGLKQSVCDQGFYNGPVSKFWAYAFVLSKAPELGDTIFIILRKQKL
IFLHWYHHITVLLYSWYSYKDMVAGGGWFMTMNYGVHAVMYSYYALRAAGFRVSRKFAMFITLSQITQ
MLMGCVVNYLVFCWMQHDQCHSHFQNIFWSSLMYLSYLVLFCHFFFEAYIGKMRKTTKAE

| | | |
|---|---|---|
| NOV3f, CG180320-05 | SEQ ID NO:27 | 834bp |
| DNA Sequence | ORF Start: at 1 | ORF Stop: TAG at 832 |

TCCACCATGGGTTACCCATATGACGTTCCAGACTACGCAAACATGTCAGTGTTGACTTTACAAGAATA
TGAATTCGAAAAGCAGTTCAACGAGAATGAAGCCATCCAATGGATGCAGGAAAACTGGAAGAAATCTT
TCCTGTTTTCTGCTCTGTATGCTGCCTTTATATTCGGTGGTCGGCACCTAATGAATAAACGAGCAAAG
TTTGAACTGAGGAAGCCATTAGTGCTCTGGTCTCTGACCCTTGCAGTCTTCAGTATATTCGGTGCTCT
TCGAACTGGTGCTTATATGGTGTACATTTTGATGACCAAAGGCCTGAAGCAGTCAGTTTGTGACCAGG
GTTTTTACAATGGACCTGTCAGCAAATTCTGGGCTTATGCATTTGTGCTAAGCAAAGCACCCGAACTA
GGAGATACAATATTCATTATTCTGAGGAAGCAGAAGCTGATCTTCCTGCACTGGTATCACCACATCAC
TGTGCTCCTGTACTCTTGGTACTCCTACAAAGACATGGTTGCCGGGGGAGGTTGGTTCATGACTATGA
ACTATGGCGTGCACGCCGTGATGTACTCTTACTATGCCTTGCGGGCGGCAGGTTTCCGAGTCTCCCGG
AAGTTTGCCATGTTCATCACCTTGTCCCAGATCACTCAGATGCTGATGGGCTGTGTGGTTAACTACCT
GGTCTTCTGCTGGATGCAGCATGACCAGTGTCACTCTCACTTTCAGAACATCTTCTGGTCCTCACTCA
TGTACCTCAGCTACCTTGTGCTCTTCTGCCATTTCTTCTTTGAGGCCTACATCGGCAAAATGAGGAAA
ACAACGAAAGCTGAATAG

| | | | |
|---|---|---|---|
| NOV3f, GG180320-05 | | | |
| Protein Sequence | SEQ ID NO:28 | 277 aa | MW at 32705.1 kD |

STMGYPYDVPDYANMSVLTLQEYEFEKQFNENEAIQWMQENWKKSFLFSALYAAFIFGGRHLMNKRAK
FELRKPLVLWSLThAVFSIFGALRTGAYMVYILMTKGLKQSVCDQGFYNGPVSKFWAYAFVLSKAPEL
GDTIFIILRKQKLIFLHWYHHITVLLYSWYSYKDMVAGGGWFMTMNYGVHAVMYSYYALRAAGFRVSR
KFAMFITLSQITQMLMGCVVNYLVFCWMQHDQCHSHFQNIFWSSLMYLSYLVLFCHFFFEAYIGKMRK
TTKAE

[0453] A ClustalW comparison of the above protein sequences yields the following sequence alignment shown in Table C5.

TABLE C5
Comparison of the NOV3 protein sequences.

| | |
|---|---|
| NOV3a | ————————————MNMSVLTLQEYEFEKQFNENEAIQWMQENWKKSFLFSALYAAFIFGGR |
| NOV3b | ————————TGSTMNMSVLTLQEYEFEKQFNENEAIQWMQENWKKSFLFSAIYAAFIFGGR |
| NOV3c | —————————————NMSVLTLQEYEFEKQFNENEAIQWMQENWKKSFLFSALYAAFIFGGR |
| NOV3d | ———————————TMNMSVLTLOEYEFEKQFNEMEAIQWMQENWKKSFLFSALYAAFIFGGR |
| NOV3e | —————————————NMSVLTLQEYEFEKQFNENEAIQWMQEMWKKSFLFSALYAAFIFGGR |
| NOV3f | STMGYPYDVPDYANMSVLTLQEYEFEKQFNENEAIQWMQEMWKKSFLFSALYAAFIFGGR |
| NOV3a | HLMNKRAKFELRKPLVLWSLTLAVFSIFGALRTGAYMVYILMTKGLKQSVCDQGFYNGPV |
| NOV3b | HLMNKRAKFELRKPLVLWSLTLAVFSIFGALRTGAYMVYILMTKGLKQSVCDQGFYNGPV |
| NOV3c | HLMNKRAKFELRKPLVLWSLTLAVFSIFGALRTGAYMVYILMTKGLKQSVCDQGFYNGPV |
| NOV3d | HLMNKRAKFELRKPLVLWSLTLAVFSIFGALRTGAYMVYILMTKGLKQSVCDQGFYNGPV |
| NOV3e | HLMNKRAKFELRKPLVLWSLTLAVFSIFGALRTGAYMVYILMTKGLKQSVCDQGFYNGPV |
| NOV3f | HLMNKRAKFELRKPLVLWSLTLAVFSIFGALRTGAYMVYILMTKGLKQSVCDQGFYNGPV |
| NOV3a | SKFWAYAFVLSKAPELGDTIFIILRKQKLIFLHWYHHITVLLYSWYSYKDMVAGGGWFMT |
| NOV3b | SKFWAYAFVLSKAPELGDTIFIILRKQKLIFLHWYHHITVLLYSWYSYKDMVAGGGWFMT |
| NOV3c | SKFWAYAFVLSKAPELGDTIFIILRKQKLIFLHWYHHITVLLYSWYSYKDMVAGGGWFMT |
| NOV3d | SKFWAYAFVLSKAPELGDTIFIILRKQKLIFLHWYHHITVLLYSWYSYKDMVAGGGWFMT |
| NOV3e | SKFWAYAFVLSKAPELGDTIFIILRKQKLIFLHWYHHITVLLYSWYSYKDMVAGGGWFMT |
| NOV3f | SKFWAYAFVLSKAPELGDTIFIILRKQKLIFLHWYHHITVLLYSWYSYKDMVAGGGWFMT |
| NOV3a | MNYGVHAVMYSYYALRAAGFRVSRKFAMFITLSQITQMLMGCVVNYLVFCWMQHDQCHSH |
| NOV3b | MNYGVHAVMYSYYALRAAGFRVSRKFANFITLSQITQMLMGCVVNYLVFCWMQHDQCHSH |
| NOV3c | MNYGVHAVMYSYYALRAAGFRVSRKFAMFITLSQITQMLMGCVVNYLVFCWMQHDQCHSH |
| NOV3d | MNYGVHAVMYSYYALRAAGFRVSRKFANFITLSQITQMLMGCVVNYLVFCWMQHDQCHSH |
| NOV3e | MNYGVHAVMYSYYALRAAGFRVSRKFANFITLSQITQMLMGCVVNYLVFCWMQHDQCHSH |
| NOV3f | MNYGVHAVMYSYYALRAAGFRVSRKFAMFITLSQITQMLMGCVVNYLVFCWMQHDQCHSH |
| NOV3a | FQNIFWSSLMYLSYLVLFCHFFFEAYIGKMRKTTKAE |
| NOV3b | FQNIFWSSLMYLSYLVLFCHFFFEAYIGKMRKTTKAE |
| NOV3c | FQNIFWSSLMYLSYLVLFCHFFFEAYIGKMRKTTKAE |
| NOV3d | FQNIFWSSLMYLSYLVLFCHFFFEAYIGKMRKTTKAE |
| NOV3e | FQNIFWSSLMYLSYLVLFCHFFFEAYIGKMRKTTKAE |
| NOV3f | FQNIFWSSLMYLSYLVLFCHFFFEAYIGKMRKTTKAE |
| NOV3a | (SEQ ID NO:18) |
| NOV3b | (SEQ ID NO:20) |
| NOV3c | (SEQ ID NO:22) |
| NOV3d | (SEQ ID NO:24) |
| NOV3e | (SEQ ID NO:26) |
| NOV3f | (SEQ ID NO:28) |

[0454] Further analysis of the NOV3a protein yielded the following properties shown in Table C6.

TABLE C6
Protein Sequence Properties NOV3a

| SignalP | Cleavage site between residues 47 and 48 | | | |
|---|---|---|---|---|
| analysis: | | | | |
| PSORT II | PSG: a new signal peptide prediction method | | | |
| analysis: | N-region: length 10; pos. chg 0; neg. chg 1 | | | |
| | H-region: length 1; peak value 0.00 | | | |
| | PSG score: −4.40 | | | |
| | GvH: von Heijne's method for signal seq. recognition | | | |
| | GvH score (threshold: −2.1): −1.00 | | | |
| | possible cleavage site: between 46 and 47 | | | |
| | >>> Seems to have no N-terminal signal peptide | | | |
| | ALOM: Klein et al's method for TM region allocation | | | |
| | Init position for calculation: 1 | | | |
| | Tentative number of TMS(s) for the threshold 0.5: 3 | | | |
| | Number of TMS(s) for threshold 0.5: 1 | | | |
| | INTEGRAL | Likelihood = | −5.63 | Transmembrane 63-79 |
| | PERIPHERAL | Likelihood = | 2.54 (at 116) | |
| | ALOM score: −5.63 (number of TMSs: 1) | | | |
| | MTOP: Prediction of membrane topology (Hartmann et al.) | | | |
| | Center position for calculation: 70 | | | |
| | Charge difference: −3.5 C(2.0)-N(5.5) | | | |
| | N >= C: N-terminal side will be inside | | | |
| | >>> membrane topology: type 2 (cytoplasmic tail 1 to 63) | | | |
| | MITDISC: discrimination of mitochondrial targeting seq | | | |
| | R content: | 0 | Hyd Moment(75): | 1.56 |
| | Hyd Moment(95): | 3.11 | G content: | 0 |
| | D/E content: | 2 | S/T content: | 2 |

```
Score: −7.42
Gavel: prediction of cleavage sites for mitochondrial preseq
cleavage site motif not found
NUCDISC: discrimination of nuclear localization signals
pat4: none
pat7: none
bipartite: none
content of basic residues: 9.8%
NLS Score: −0.47
KDEL: ER retention motif in the C-terminus: none
ER Membrane Retention Signals:
KKXX-like motif in the C-terminus: TTKA
SKL: peroxisomal targeting signal in the C-terminus: none
PTS2: 2nd peroxisomal targeting signal: none
VAC: possible vacuolar targeting motif: none
RNA-binding motif: none
Actinin-type actin-binding motif:
type 1: none
type 2: none
NMYR: N-myristoylation pattern: none
Prenylation motif: none
memYQRL: transport motif from cell surface to Golgi: none
Tyrosines in the tail: too long tail
Dileucine motif in the tail: none
checking 63 PROSITE DNA binding motifs: none
checking 71 PROSITE ribosomal protein motifs: none
checking 33 PROSITE prokaryotic DNA binding motifs: none
NNCN: Reinhardt's method for Cytoplasmic/Nuclear discrimination
Prediction: cytoplasmic
Reliability: 94.1
COIL: Lupas's algorithm to detect coiled-coil regions
total: 0 residues
Final Results (k = 9/23):
30.4%: cytoplasmic
30.4%: mitochondrial
13.0%: Golgi
  8.7%: endoplasmic reticulum
  4.3%: extracellular, including cell wall
  4.3%: vacuolar
  4.3%: nuclear
  4.3%: vesicles of secretory system
>> prediction for CG180320-01 is cyt (k = 23)
```

[0455] A search of the NOV3a protein against the Geneseq database, a proprietary database that contains sequences published in patents and patent publication, yielded several homologous proteins shown in Table C7.

TABLE C7
Geneseq Results for NOV3a

| | | NOV3a | Identities/ | |
|---|---|---|---|---|
| | | Residues/ | Similarities for | |
| Geneseq | Protein/Organism/Length | Match | the Matched | Expect |
| Identifier | [Patent #, Date] | Residues | Region | Value |
| ABB82962 | Human LCE related protein | 1 . . . 265 | 265/265 (100%) | e−159 |
| | (GenBanK Identifier No. | 1 . . . 265 | 265/265 (100%) | |
| | GI#10440045) - Homo sapiens, 265 | | | |
| | aa. [WO200299068-A2, 12-DEC-2002] | | | |
| ABB82961 | Human LCE related protein | 1 . . . 265 | 265/265 (100%) | e−159 |
| | (GenBanK Identifier No. | 1 . . . 265 | 265/265 (100%) | |
| | aa. [WO200299068-A2, 12-DEC-2002] | | | |
| AAG79838 | ADSL related polypeptide #2 - | 1 . . . 265 | 265/265 (100%) | e−159 |
| | Homo sapiens, 265 aa. | 1 . . . 265 | 265/265 (100%) | |
| | [WO200299038-A2, 12-DEC-2002] | | | |
| AAU87832 | Human elongase HS3 - Homo | 1 . . . 265 | 265/265 (100%) | e−159 |
| | sapiens, 265 aa. [WO200208401-A2, | 1 . . . 265 | 265/265 (100%) | |
| | 31-JAN-2002] | | | |
| AAU00476 | Human INTERCEPT 400 protein - | 1 . . . 265 | 265/265 (100%) | e−159 |
| | Homo sapiens, 265 aa. | 1 . . . 265 | 265/265 (100%) | |
| | [WO200118016-A1, 15-MAR-2001] | | | |

[0456] In a BLAST search of public sequence databases, the NOV3a protein was found to have homology to the proteins shown in the BLASTP data in Table C8.

TABLE C8
Public BLASTP Results for NOV3a

| | | NOV3a | Identities/ | |
|---|---|---|---|---|
| Protein | | Residues/ | Similarities for | |
| Accession | | Match | the Matched | Expect |
| Number | Protein/Organism/Length | Residues | Portion | Value |
| Q9H5J4 | Hypothetical protein FLJ23378 - | 1 . . . 265 | 265/265 (100%) | e−158 |
| | Homo sapiens (Human), 265 aa. | 1 . . . 265 | 265/265 (100%) | |
| Q920L5 | Fatty acyl elongase (Long-chain | 1 . . . 265 | 257/267 (96%) | e−152 |
| | fatty-acyl elongase) (Myelination | 1 . . . 267 | 262/267 (97%) | |
| | associated SUR4-like protein) - Mus | | | |
| | musculus (Mouse), 267 aa. | | | |
| Q920L6 | Fatty acid elongase 2 - Rattus | 1 . . . 265 | 256/267 (95%) | e−152 |
| | norvegicus (Rat), 267 aa. | 1 . . . 267 | 262/267 (97%) | |
| Q8CE45 | Long chain fatty acyl elongase - Mus | 1 . . . 265 | 256/267 (95%) | e−151 |
| | musculus (Mouse), 267 aa. | 1 . . . 267 | 261/267 (96%) | |
| Q8NCD1 | Hypothetical protein FLJ90332 - | 26 . . . 265 | 240/240 (100%) | e−143 |
| | Homo sapiens (Human), 240 aa. | 1 . . . 240 | 240/240 (100%) | |

[0457] PFam analysis predicts that the NOV3a protein contains the domains shown in the Table C9.

TABLE C9
Domain Analysis of NOV3a

| | | Identities/ | |
|---|---|---|---|
| Pfam | NOV3a | Similarities for | |
| Domain | Match Region | the Matched Region | Expect Value |
| ELO | 10 . . . 265 | 85/327 (26%) | 5.2e−46 |
| | | 168/327 (51%) | |

### EXAMPLE C3

### Expression Profile of the Human Long Chain Fatty Acyl Elongase Gene

[0458] The protocol for quantitative expression analysis is disclosed in Example Q9.

[0459] Expression of genes CG180320-01, CG180320-O₂, CG180320-03, and CG180320-04 was assessed using the primer-probe set Ag6596, described in Table C10. Results of the RTQ-PCR runs are shown in Tables C11 and C12.

TABLE C10
Probe Name Ag6596

| | | | Start | SEQ ID |
|---|---|---|---|---|
| Primers | Sequences | Length | Position | No |
| Forward | 5′-caatggatgcaggaaaactg-3′ | 20 | 350 | 186 |
| Probe | TET-5′-tttcctgttttctgctctgtatgctg-3′- | 26 | 379 | 187 |
| | TAMRA | | | |
| Reverse | 5′-ccgaccaccgaatataaagg-3′ | 20 | 405 | 188 |

[0460] TABLE C11
General screening panel v1.6

| | Rel. Exp. (%) |
|---|---|
| | Ag6596, Run |
| Tissue Name | 277256790 |
| Adipose | 2.2 |
| Melanoma* Hs688(A).T | 6.0 |
| Melanoma* Hs688(B).T | 11.9 |
| Melanoma* M14 | 11.0 |
| Melanoma* LOXIMVI | 26.1 |
| Melanoma* SK-MEL-5 | 29.1 |
| Squamous cell carcinoma SCC-4 | 24.1 |
| Testis Pool | 0.9 |
| Prostate ca.* (bone met) PC-3 | 2.0 |
| Prostate Pool | 1.9 |
| Placenta | 0.5 |
| Uterus Pool | 0.7 |
| Ovarian ca. OVCAR-3 | 25.0 |
| Ovarian ca. SK-OV-3 | 4.5 |
| Ovarian ca. OVCAR-4 | 3.6 |
| Ovarian ca. OVCAR-5 | 50.0 |
| Ovarian ca. IGROV-1 | 12.0 |
| Ovarian ca. OVCAR-8 | 14.4 |
| Ovary | 2.4 |
| Breast ca. MCF-7 | 20.7 |
| Breast ca. MDA-MB-231 | 100.0 |
| Breast ca. BT 549 | 47.3 |
| Breast ca. T47D | 4.8 |
| Breast ca. MDA-N | 10.1 |
| Breast Pool | 1.7 |
| Trachea | 1.9 |
| Lung | 0.4 |
| Fetal Lung | 5.6 |
| Lung ca. NCI-N417 | 8.2 |
| Lung ca. LX-1 | 15.7 |
| Lung ca. NCI-H146 | 4.0 |
| Lung ca. SHP-77 | 18.8 |
| Lung ca. A549 | 20.3 |
| Lung ca. NCI-H526 | 6.4 |
| Lung ca. NCI-H23 | 8.6 |
| Lung ca. NCI-H460 | 12.1 |
| Lung ca. HOP-62 | 13.7 |
| Lung ca. NCI-H522 | 2.8 |
| Liver | 3.1 |
| Fetal Liver | 38.2 |
| Liver ca. HepG2 | 10.9 |
| Kidney Pool | 2.7 |
| Fetal Kidney | 17.9 |
| Renal ca. 786-0 | 21.5 |
| Renal ca. A498 | 17.1 |
| Renal ca. ACHN | 7.7 |
| Renal ca. UO-31 | 11.3 |
| Renal ca. TK-10 | 14.4 |
| Bladder | 5.1 |
| Gastric ca. (liver met.) NCI-N87 | 28.1 |
| Gastric ca. KATO III | 55.5 |
| Colon ca. SW-948 | 14.2 |
| Colon ca. SW480 | 10.4 |
| Colon ca.* (SW480 met) SW620 | 8.6 |
| Colon ca. HT29 | 15.3 |
| Colon ca. HCT-116 | 45.4 |
| Colon ca. CaCo-2 | 22.2 |
| Colon cancer tissue | 6.9 |
| Colon ca. SW1116 | 5.9 |
| Colon ca. Colo-205 | 15.0 |
| Colon ca. SW-48 | 10.4 |
| Colon Pool | 3.5 |
| Small Intestine Pool | 1.9 |
| Stomach Pool | 2.1 |
| Bone Marrow Pool | 1.5 |
| Fetal Heart | 2.9 |
| Heart Pool | 1.0 |
| Lymph Node Pool | 4.1 |
| Fetal Skeletal Muscle | 4.1 |
| Skeletal Muscle Pool | 0.2 |
| Spleen Pool | 1.4 |
| Thymus Pool | 3.5 |
| CNS cancer (glio/astro) U87-MG | 31.2 |
| CNS cancer (glio/astro) U-118-MG | 45.1 |
| CNS cancer (neuro; met) SK-N-AS | 47.3 |
| CNS cancer (astro) SF-539 | 8.3 |
| CNS cancer (astro) SNB-75 | 10.3 |
| CNS cancer (glio) SNB-19 | 20.9 |
| CNS cancer (glio) SF-295 | 28.7 |
| Brain (Amygdala) Pool | 7.8 |
| Brain (cerebellum) | 13.6 |
| Brain (fetal) | 16.0 |
| Brain (Hippocampus) Pool | 5.6 |
| Cerebral Cortex Pool | 9.8 |
| Brain (Substantia nigra) Pool | 6.4 |
| Brain (Thalamus) Pool | 12.5 |
| Brain (whole) | 6.1 |
| Spinal Cord Pool | 12.3 |
| Adrenal Gland | 9.7 |
| Pituitary gland Pool | 1.9 |
| Salivary Gland | 0.3 |
| Thyroid (female) | 0.4 |
| Pancreatic ca. CAPAN2 | 32.5 |
| Pancreas Pool | 1.5 |

[0461] TABLE C12
Panel 5 Islet

| | Rel. Exp. (%) |
|---|---|
| | Ag6596, Run |
| Tissue Name | 279518227 |
| 97457_Patient-02go_adipose | 1.5 |
| 97476_Patient-07sk_skeletal muscle | 0.0 |
| 97477_Patient-07ut_uterus | 1.6 |
| 97478_Patient-07pl_placenta | 0.5 |
| 99167_Bayer Patient 1 | 1.3 |
| 97482_Patient-08ut_uterus | 2.0 |
| 97483_Patient-08pl_placenta | 0.9 |
| 97486_Patient-09sk_skeletal muscle | 0.6 |
| 97487_Patient-09ut_uterus | 1.4 |
| 97488_Patient-09pl_placenta | 0.5 |
| 97492_Patient-10ut_uterus | 2.1 |
| 97493_Patient-10pl_placenta | 1.4 |
| 97495_Patient-11go_adipose | 1.1 |
| 97496_Patient-11sk_skeletal muscle | 0.1 |
| 97497_Patient-11ut_uterus | 3.9 |
| 97498_Patient-11pl_placenta | 0.3 |
| 97500_Patient-12go_adipose | 1.2 |
| 97501_Patient-12sk_skeletal muscle | 1.4 |
| 97502_Patient-12ut_uterus | 1.5 |
| 97503_Patient-12pl_placenta | 0.8 |
| 94721_Donor 2 U - A_Mesenchymal Stem Cells | 8.8 |
| 94722_Donor 2 U - B_Mesenchymal Stem Cells | 8.5 |
| 94723_Donor 2 U - C_Mesenchymal Stem Cells | 8.9 |
| 94709_Donor 2 AM - A_adipose | 9.6 |
| 94710_Donor 2 AM - B_adipose | 6.5 |
| 94711_Donor 2 AM - C_adipose | 4.9 |
| 94712_Donor 2 AD - A_adipose | 24.7 |
| 94713_Donor 2 AD - B_adipose | 29.3 |
| 94714_Donor 2 AD - C_adipose | 22.2 |
| 94742_Donor 3 U - A_Mesenchymal Stem Cells | 4.8 |
| 94743_Donor 3 U - B_Mesenchymal Stem Cells | 5.6 |
| 94730_Donor 3 AM - A_adipose | 17.2 |
| 94731_Donor 3 AM - B_adipose | 27.5 |
| 94732_Donor 3 AM - C_adipose | 17.2 |
| 94733_Donor 3 AD - A_adipose | 80.1 |
| 94734_Donor 3 AD - B_adipose | 74.2 |
| 94735_Donor 3 AD - C_adipose | 24.8 |
| 77138_Liver_HepG2untreated | 100.0 |
| 73556_Heart_Cardiac stromal cells (primary) | 1.5 |
| 81735 Small Intestine | 4.0 |
| 72409_Kidney_Proximal Convoluted Tubule | 33.2 |
| 82685_Small intestine_Duodenum | 6.0 |
| 90650_Adrenal_Adrenocortical adenoma | 2.2 |
| 72410_Kidney_HRCE | 19.1 |
| 72411_Kidney_HRE | 20.0 |
| 73139_Uterus_Uterine smooth muscle cells | 16.6 |

[0462] General screening panel v1.6 Summary: (Ag6596) Moderate expression of this gene was detected ubiquitously in all tissues (CT=28-32). This ubiquitous pattern of expression indicates that this gene product is involved in homeostatic processes for these and other cell types and tissues.

[0463] Its expression was elevated in all the cancer cell lines (melanoma, ovarian cancer, breast cancer, lung cancer, renal cancer, colon cancer, pancreatic cancer, and CNS cancer) with CT=25.5-30. Therapeutic modulation of this gene, expressed protein and/or use of antibodies or small molecule drugs targeting the gene or gene product may be useful in the treatment of melanoma, ovarian cancer, breast cancer, lung cancer, renal cancer, pancreatic cancer, and CNS cancer. In addition, the expression of this gene can be used as a detection marker for those cancers.

[0464] This gene was expressed in adipose tissue (CT=30.98). Therapeutic modulation of this gene, expressed protein and/or use of antibodies or small molecule drugs targeting the gene or gene product may be useful in the treatment of obesity and diabetes.

[0465] Panel 5 Islet Summary: (Ag6596) Expression of this gene was induced in adipose differentiated from Mesenchymal Stem cells (compare AD samples with U samples from Donor 2 (CT=30.46-30.86 vs. CT=32.18-32.24) and Donor 3 (CT=29.01-30.7 vs. CT=32.84-33.07). Thus therapeutic modulation of this gene, expressed protein and/or use of antibodies or small molecule drugs targeting the gene or gene product can be useful in the treatment of obesity and diabetes.

### EXAMPLE C4

### Assays Screening for Modulators of Long Chain Fatty Acyl Elongase

[0466] A non-exhaustive list of cell lines that express the long chain fatty acyl elongase can be obtained from the differential gene expression (RTQ-PCR) results presented herein.

[0467] Potential methods for Measurement of Fatty Acyl elongation reaction in microsomes are described by Nagi et al., Evidence for two separate beta-ketoacyl CoA reductase components of the hepatic microsomal fatty acid chain elongation system in the rat, Biochem Biophys Res Commun. 1989 Dec. 29; 165 (3):1428-34, and by Moon et al., Identification of a mammalian long chain fatty acyl elongase regulated by sterol regulatory element-binding proteins, J Biol. Chem. 2001 Nov. 30; 276 (48):45358-66. Epub 2001 Sep. 20, followed by HPLC separation of radio-labeled fatty acids by HPLC.

[0468] Functional/mechanistic assay for the effectiveness of an administered modulator of Fatty Acyl Elongase could be performed by obesrving TG synthesis/accumulation in 3T3-L1 mouse adipocytes, human adipocytes or hepatocytes by Oil Red O staining. Alternatively measurement could be made of post treatment TG accumulation in cells transfected with Fatty Acyl Elongase.

[0469] Our results indicate that a modulator of Long Chain Fatty Acyl Elongase activity, such as an inhibitor, activator, antagonist, or agonist of Long Chain Fatty Acyl Elongase may be useful for treatment of such disorders as obesity, diabetes, and insulin resistance, as well as for enhancement of insulin secretion.

D. NOV4—Acetyl-Coenzyme A acyltransferase 2

[0470] Acetyl-Coenzyme A acyltransferase 2 (ACAA2) is the last enzyme in mitochondrial fatty acid beta-oxidation. It is thought that fatty acid oxidation may interfere with glucose utilization in skeletal muscle and liver, thus causing insulin resistance and hyperglycemia. (Randle P J. Regulatory interactions between lipids and carbohydrates: the glucose fatty acid cycle after 35 years. Diabetes Metab. Rev. 1998 14 (4), 263-83 PMID: 10095997; Deems R O, Anderson R C, Foley J E. Hypoglycemic effects of a novel fatty acid oxidation inhibitor in rats and monkeys. Am. J. Physiol. 1998 274 (2 Pt 2):R524-8; PMID: 9486313). GeneCalling® studies showed significant up-regulation of ACAA2 in diabetic muscle. ACAA2 was also down-regulated in fast twitch versus slow twitch diabetic skeletal muscle in response to vanadate, metformin and AICAR, compounds causing improvement of hypoglycemia and diabetes. GeneCalling® data indicate that ACAA2 may make a good target for promoting skeletal muscle glucose utilization and improving diabetes.

[0471] Shown below is the reaction catalyzed by human Acetyl-Coenzyme A acyltransferase 2.
3-oxoacyl CoA+CoA⇄Acyl CoA+Acetyl CoA
Acetyl CoA→TCA cycle

[0472] Potential assay that may be used to screen for antibody therapeutics or small molecule drugs is the measurement of NAD+/NADH production in the outlined reaction coupled with the conversion reaction of 3-hydroxyacyl CoA to 3-oxoacyl CoA by the next mitochondrial enzyme. The general inhibitor for mitochondrial thiolases (4-bromocrotonic acid) is described in literature (Schulz et al., Life Sci. (1987) 40, 1443). Cell lines expressing the Acetyl-Coenzyme A acyltransferase 2 can be obtained from the RTQ-PCR results shown herein. These and other Acetyl-Coenzyme A acyltransferase 2 expressing cell lines could be used for screening purposes.

[0473] ACAA2 catalyses the last step in acetyl-CoA production. Concerning accumulation of ACAA2 substrate, 3-oxoacyl-CoA has no reported toxicity and causes inhibition of two other enzymes in fatty acid oxidation cycle. The outcome of inhibiting the action of the human Acetyl-Coenzyme A acyltransferase 2 would be inhibition of fatty acid oxidation in skeletal muscle and liver, and promotion of glucose utilization.

[0474] Acetyl-Coenzyme A acyltransferase 2 (ACAA2) (3-oxoacyl-CoA thiolase) is up-regulated in skeletal muscle in obese/diabetic skeletal muscle. The expression level of the enzyme is down-regulated in gastrocnemius versus soleus muscle in response to vanadate, AICAR and Metformin treatments (all are known to improve glucose utilization in muscle). ACAA2 is the last enzyme in fatty acid beta-oxidation. Inhibition of ACAA2 would inhibit fatty acid oxidation in skeletal muscle and liver, promoting glucose utilization. Thus, an inhibitor/antagonist of ACAA2 would be beneficial as an antihyperglycemic agent for the treatment of obesity and/or diabetes.

[0475] Furthermore, we discovered that Acetyl-Coenzyme A acyltransferase 2 (ACAA2) is down-regulated in diabetic skeletal muscle of animals that respond favorably to rosiglitazone treatment with improved glycemic control. However, the expression of Acetyl-Coenzyme A acyltransferase 2 was found to be not down-regulated in response to rosiglitazone treatment in diabetic animals that had no detectable improvement of hyperglycemia. Because acetyl-Coenzyme A acyltransferase 2 expression is positively correlated with hyperglycemia, its down-regulation may account for the antidiabetic effect of rosiglitazone. Therefore, an attenuation of Acetyl-Coenzyme A acyltransferase 2 total enzymatic activity might account for, and be sufficient to yield, favorable clinical effects comparable to that of rosiglitazone on hyperglycemia and skeletal muscle insulin sensitivity. Our data support the development of an antagonist of Acetyl-Coenzyme A acyltransferase 2 as a therapeutic agent to treat insulin resistance and diabetes.

[0476] Furthermore, our results indicate that a modulator of ACAA2 activity, such as an inhibitor, activator, antagonist, or agonist of ACAA2 may be useful for treatment of such disorders as obesity, diabetes, and insulin resistance, as well as for enhancement of insulin secretion.

Discovery Process

[0477] The following sections describe the study design(s) and the techniques used to identify the Acetyl-Coenzyme A acyltransferase 2—encoded protein and any variants, thereof, as being suitable as diagnostic markers, targets for an antibody therapeutic and targets for a small molecule drugs for Obesity and Diabetes.

### EXAMPLE D1

### Mouse Dietary-Induced Obesity

[0478] A protocol for Mouse Dietary-Induced Obesity study is disclosed in Example Q1.

[0479] The predominant cause for obesity in clinical populations is excess caloric intake. This so-called diet-induced obesity (DIO) is mimicked in animal models (mouse strain C57BL) by feeding high fat diets of greater than 40% fat content. The DIO study was established to identify the gene expression changes contributing to the development and progression of diet-induced obesity. In addition, the study design sought to identify the factors that lead to the ability of certain individuals to resist the effects of a high fat diet and thereby prevent obesity. The sample groups for the study had body weights +1 S.D., +4 S.D. and +7 S.D. of the chow-fed controls. In addition, the biochemical profile of the +7 S.D. mice revealed a further stratification of these animals into mice that retained a normal glycemic profile in spite of obesity and mice that demonstrated hyperglycemia. Tissues examined included hypothalamus, brainstem, liver, retroperitoneal white adipose tissue (WAT), epididymal WAT, brown adipose tissue (BAT), gastrocnemius muscle (fast twitch skeletal muscle) and soleus muscle (slow twitch skeletal muscle). The differential gene expression profiles for these tissues revealed genes and pathways that can be used as therapeutic targets for obesity and/or diabetes. Protocol for differential gene expression analysis, GeneCalling®, is disclosed in Example Q7.

Results

[0480] A fragment of the mouse Acetyl-Coenzyme A acyltransferase 2 gene was initially found to be up-regulated by 1.6 fold in the muscle of the obese, diabetic mice (hgsd7) on a high fat diet as compared to mice on normal diet (chow) using CuraGen's GeneCalling® method of differential gene expression. A differentially expressed mouse gene fragment migrating, at approximately 380.4 nucleotides in length was definitively identified as a component of the mouse Acetyl-Coenzyme A acyltransferase 2 cDNA. The method of competitive PCR was used for confirmation of the gene assessment. The electropherographic peaks corresponding to the gene fragment of the mouse Acetyl-Coenzyme A acyltransferase 2 were ablated when a gene-specific primer (shown in Table D1) competes with primers in the linker-adaptors during the PCR amplification. The peaks at 380.4 nt in length were ablated in the sample from both the obese/diabetic and normal chow mouse.

TABLE D1

The direct sequence of the 380.4 nucleotide-long gene fragment and
the gene-specific primers used for competitive PCR are indicated on
the cDNA sequence of the Acetyl-Coenzyme A acyltransferase 2 fragment
(SEQ ID NO:189) and are shown in bold. The gene-specific primers at
the 5′ and 3′ ends of the fragment are underlined.
Competitive PCR Primer for the mouse Acetyl-Coenzyme A
acyltransferase 2: Gene Sequence (fragment from 507 to 886 in bold.
band size: 380)

| | |
|---|---|
| 1 | AGAGCCCCGC GGAATAGCTG AGCTTCGCCA TGGCCCTGCT ACGAGGTGTG TTCATCGTCG |
| 61 | CTGCGAAGAG ACACCCTTTG GAGCTTACGG GGGCCTTCTC AAGGACTTCT CTGCCACCGA |
| 121 | TTTAACTGAA TTTGCTGCCA GGGCTGCTCT GTCUGCTGGC AAAGTTCCAC CTGAAACCAT |
| 181 | CGATAGTGTC ATCGTGGGCA ATGTCATGCA GAGCTCTTCA GATGCGGCAT ACCTGGCGAG |
| 241 | GCATGTGGGT TTGCGAGTGG GAGTCCCAAC AGAGACTGGG GCCCTTACCC TCAACAGGCT |
| 301 | CTGTGGCTCT GGTTTCCAGT CCATCGTGAG CGGATGTCAG GAAATCTGTT CTAAAGATGC |
| 361 | TGAGGTCGTC TTGTGTGGAG GAACAGAGAG CATGAGCCAG TCCCCCTACT GTGTCAGAAA |
| 421 | TGTGCGCTTC GGAACCAAAT TTGGATTAGA TCTCAAGCTG GAAGATACTT TGTGGGCAGG |
| 481 | ATTAACGGAT CAACATGTTA AGCTGCCCAT GGGAATGACT GCAGAGAACC TTGCTGCAAA |
| 541 | ATACAACATA AGCAGAGAAG ACTGTGACAG ATACGCCTTG CAGTCTCAGC AGAGGTGGAA |
| 601 | AGCTGCTAAC GAGGCTGGCT ACTTCAATGA GGAGATGGCA CCCATTGAGG TGAAGACGAA |
| 661 | GAAAGGCAAA CAGACCATGC AAGTGGACGA GCACGCTCGA CCCCAAACCA CCCTGGAGCA |
| 721 | ACTGCAGAAG CTCCCGTCCG TGTTCAAGAA AGACGGGACA GTCACAGCAG GGAACGCCTC |
| 781 | GGGGGTGTCT GACGGTGCTG GGGCCGTCAT CATAGCCAGC GAAGATGCTG TCAAAAAACA |
| 841 | TAACTTCACG CCCCTGGCCA GAGTCGTGGG CTACTTCGTG TCCGGATGCG ATCCTACTAT |
| 901 | CATGGGTATT GGTCCAGTCC CTGCTATCAA TGGAGCATTG AAGAAAGCTG GGCTGAGTCT |
| 961 | TAAGGACATG GATTTGATAG ACGTGAACGA AGCTTTTGCC CCTCAGTTCT TGTCTGTTCA |
| 1021 | GAAGGCCCTG GATCTTGACC CCAGCAAAAC CAATGTGAGT GGAGGCGCCA TTGCCCTGGG |
| 1081 | TCACCCGCTG GGAGGATCTG GCTCCAGAAT CACCGCACAC CTGGTTCATG AGTTAAGGCG |
| 1141 | TCGAGGTGGA AAGTACGCAG TGGGATCAGC TTGCATTGGA GGTGGCCAAG GCATCGCCTT |
| 1201 | GATCATCCAG AACACAGCCT GAAGGCATCA CAAGCACACT GCCCACACTT ACTGGGCCAG |
| 1261 | GCCACGGAAC ACAGGAGACC TTCGAGTCAG CCCTGCTGAG ACAGTGATTG TATGTGACCA |
| 1321 | AGCCTTGATG AGGCAAGATG CATTGGGTTC TGTCTACTTC ATACCTGTCT GACGTGTTAG |
| 1381 | AATAAAAACA CCAACCATCG GAGGCCTTAA GAGAAATGGT ATCTGTCAGT AGTCACCACT |
| 1441 | GTATGCCTTC CATGGAGTAA TACAAACTGA ATAAATGTTG CCTTAACTCC AGCT |

### EXAMPLE D2

### Insulin Sensitivity In Rat Skeletal Muscle

[0481] A protocol for Rat Insulin Sensitivity study is disclosed in Example Q3.

[0482] ZDF rats were treated with a variety of agents that are known to alter insulin sensitivity. Metformin, vanadate, and AICAR enhance tissue response to insulin, while the free fatty acids generated by Liposyn (intravenous lipid infusion) ZDF rats or their lean littennates were treated with a variety of agents that are known to alter insulin sensitivity. Metformin, vanadate, and AICAR enhance tissue response to insulin, while the free fatty acids generated by Liposyn (intravenous lipid infusion) treatment reduces the response. A variety of tissues were harvested, including gastrocnemius and soleus muscles, liver, retroperitoneal and epididymal WAT, and IBAT. Protocol for differential gene expression analysis, GeneCalling®, is disclosed in Example Q7.

Results

[0483] A gene fragment of the rat Acetyl-Coenzyme A acyltransferase 2 was found to be down-regulated by 2.5 fold in gastrocnemius relative to soleus muscle in ZDF rats treated with vanadate, AICAR and Metformin using CuraGen's GeneCalling® method of differential gene expression. A differentially expressed rat gene fragment migrating, at approximately 353 nucleotides in length was definitively identified as a component of the rat Acetyl-Coenzyme A acyltransferase 2 cDNA. The method of competitive PCR was used for confirmation of the gene assessment. The electropherographic peaks corresponding to the gene fragment of the rat Acetyl-Coenzyme A acyltransferase 2 were ablated when a gene-specific primer (shown in Table D2) competes with primers in the linker-adaptors during the PCR amplification. The peaks at about 353 nt in length were ablated in the sample from both gastrocnemius and soleus muscle.

TABLE D2

The direct sequence of the 353 nucleotide-long gene fragment and
specific primers used for competitive PCR are indicated on the cDNA
sequence of the Acetyl-Coenzyme A acyltransferase 2 fragment (SEQ ID
NO:190) and are shown in bold. The gene-specific primers at the 5′
and 3′ ends of the fragment are underlined.
Competitive PCR Primer for the rat Acetyl-Goenzyme A
acyltransferase 2: Gene Sequence (fragment from 643 to 996 in bold.
band size: 354)

| | |
|---|---|
| 162 | GTCATGGCGC TGCTACGAGG TGTGTTTATC GTTGCTGCGA AGCGAACACC CTTTGGAGCT |
| 222 | TATGGGGGTC TTCTCAAGGA CTTCACTGCC ACTGACTTAA CTGAATTTGC TGCCAGGGCT |
| 282 | GCCCTGTCTG CTGGCAAAGT TCCACCGGAA ACCATCGATA GTGTCATCGT GGGCAATGTC |
| 342 | ATGCAGAGCT CTTCAGATGC GGCGTACCTG GCAAGGCATG TGGGTTTACG TGTGGGAGTC |
| 402 | CCGACGGAGA CTGGGGCCCT CACCCTCAAC AGACTCTGTG GCUCTGGTTT CCAGTCCATC |
| 462 | GTGAGCGGAT GTCAGGAAAT CTGCTCGAAA GACGCTGAGG TCGTCTTATG TGGAGGAACC |
| 522 | GAGAGCATGA GCCAGTCCCC CTACTCTGTC AGAAATGTGC GCTTCGGAAC CAAATTTGGG |
| 582 | TTAGATCTCA AGCTGGAAGA TACTTTGTGG GCAGGATTAA CGGATCAACA CGTGAAGCTC |
| 642 | CCCATGGGGA TGACTGCAGA GAACCTGGCT GCAAAATACA ACATAAGCAG AGAAGACTGC |
| 702 | GACAGATACG CCCTGCAGTC CCAGCAGAGG TGGAAAGCCG CTAACGAGGC TGGCTACTTT |
| 762 | AATGAGGAGA TGGCCCCCAT TGAGGTGAAG ACCAAGAAGG GCAAACAGAC CATGCAAGTG |
| 822 | GATGAGCACG CCCGGCCCCA AACGACCCTG GAGCAGCTGC AGAACCTCCC GCCAGTGTTC |
| 882 | AAGAAAGAGG GGACGGTCAC AGCAGGGAAC GCCTCGGGCA TGTCTGACGG TGCTGGGGTC |
| 942 | GTCATCATAG CCAGCGAAGA TGCTGTCAAA AAACATAACT TCACACCACT GGCCAGAGTC |
| 1002 | GTGGGCTACT TTGTGTCTGG ATGTGACCCT GCTATCATGG GGATCGGTCC AGTCCCTGCC |
| 1062 | ATCACTGGAG CATTGAAGAA AGCTGGGCTG AGCCTTAAGG ACATGGATTT GATAGACGTG |
| 1122 | AATGAAGCAT TTGCTCCTCA GTTCTTGGCT GTTCAGAAGA GCTTGGATCT CGACCCCAGT |
| 1182 | AAAACCAACG TGAGTGGAGG TGCCATAGCC CTGGGTCACC CGCTGGGAGG ATCTGGATCC |
| 1242 | AGAATCACCG CACACCTGGT TCACGAGTTA AGGCGTCGAG GTGGAAAATA CGCAGTGGGA |
| 1302 | TCAGCTTGCA TTGGAGGTGG CCAAGGCATC TCCCTGATCA TCCAGAACAC AGCCTGAAGG |
| 1362 | GATTGCAAGC ATCCTACCCA CCCTCACTTG GCCAGGCTAC GGAACACAGG CGACCTTTGA |
| 1422 | GTCAGCCCTG CTGTGACAGT AAATGCATTT GACCAAGCCT TGATGGGTTC TGTCT |

### EXAMPLE D3

### Mouse TZD Response Study

[0484] A protocol for Mouse TZD Response study is disclosed in Example Q4.

[0485] The peroxisome proliferator-activated receptor gamma (PPARg) is the member of the nuclear hormone receptor subfamily of transcription factors that plays a major role in regulation of metabolism (Lee C H, Olson P, Evans R M. Minireview: lipid metabolism, metabolic diseases, and peroxisome proliferator-activated receptors. Endocrinology. 2003 June; 144 (6):2201-7. PMID: 12746275). The thiazolidinedione (TZD) drugs, including rosiglitazone, are synthetic agonists of PPARg receptors that can normalize elevated plasma glucose levels in obese, diabetic rodents and are often quite efficacious therapeutic agents for the treatment of noninsulin-dependent diabetes mellitus in humans (Doggrell S. Do peroxisome proliferation receptor-gamma antagonists have clinical potential as combined antiobesity and antidiabetic drugs? Expert Opin Investig Drugs. 2003 April; 12 (4):713-6., PMID: 12665425; Gurnell M, Savage D B, Chatterjee V K, O'Rahilly S. The metabolic syndrome: peroxisome proliferator-activated receptor gamma and its therapeutic modulation. J Clin Endocrinol Metab. 2003 June; 88 (6):2412-21 PMID: 12788836). Diabetic animals demonstrate differential responses to TZD treatment. To understand the basis for this differential response we compared changes in gene expression between diabetic animals that responded favorably and that did not respond to TZD treatment. Female db/db mice were treated daily with 10 mg per kilogram body weight rosiglitazone for 7 days. On day 8, the mice were bled for blood glucose. Treated mice were grouped into either a ‘responder group’ that demonstrated a significant decrease of their hyperglycemia and a ‘non-responder group’ that demonstrated no change in their blood glucose level. Gene expression in skeletal muscle and adipose tissues was compared between untreated diabetic mice and the two sub-groups of TZD treated mice. Protocol for differential gene expression analysis, GeneCalling®, is disclosed in Example Q7.

Results

[0486] Using CuraGen's GeneCalling® method of differential gene expression, a fragment of the mouse Acetyl-Coenzyme A acyltransferase 2 gene was initially found to be down-regulated by 1.7 fold in the skeletal muscle of diabetic mice treated with rosiglitazone that demonstrated improvement of hyperglycemia relative to mice treated with rosiglitazone, but failed to decrease blood glucose level. The same fragment has been found to be down-regulated 1.9 fold in skeletal muscle of TZD treated mice with improved hyperglycemia relative to diabetic controls. A differentially expressed mouse gene fragment migrating at approximately 252 nucleotides in length on capillary gel electrophoresis was definitively identified as a component of the mouse Acetyl-Coenzyme A acyltransferase 2 cDNA. The method of competitive PCR was used for confirmation of the gene assessment. The electropherographic peak corresponding to the gene fragment of mouse Acetyl-Coenzyme A acyltransferase 2 was ablated when a gene-specific primer (shown in Table D3) competes with primers in the linker-adaptors during the PCR amplification. These data are suggestive of Acetyl-Coenzyme A acyltransferase 2 being involved in skeletal muscle insulin resistance and the progression of diabetes.

TABLE D3

The sequence of the 252 nucleotide-long gene fragment and the gene-
specific primers used for competitive PCR are indicated in bold on
the cDNA sequence of the mouse ACCA2 gene fragment (SEQ ID NO:191).
The gene-specific primers at the 5′ and 3′ ends of the fragment are
underlined.
Gene Sequence (fragment from 370 to 620 in bold. band size: 251)

| | |
|---|---|
| 1 | TTTTTTTTTT GGAGTTAAGG CAACATTTAT TCAGTTTGTA TTACTCCATG GAAGGCATAC |
| 61 | AGTGGTGACT ACTGACAGAT ACCATTTCTC TTAAGGCCTC CGATGGTTGG TGTTTTTATT |
| 121 | CTAACACGTC AGACAGGTAT GAAGTAGACA GAACCCAATG CATCTTGCCT CATCAAGGCT |
| 181 | TGGTCACATA CAATCACTGT CTCAGCAGGG CTGACTCGAA GGTCTCCTGT GTTCCGTGGC |
| 241 | CTGGCCCAGT AAGTGTGGGC AGTGTGCTTG TGATGCCTTC AGGCTGTGTT CTGGATGATC |
| 301 | AAGGCGATGC CTTGGCCACC TTCCATGCAA GCTGATTCCA CTGGGTACTT TCCACCTTGA |
| 361 | CGCCTTAACT CATCAACCAG GTGTGCGGTG ATTCTGGACC CAGATCCTCC CAGCGGGTGA |
| 421 | CCCAGGCCAA TGCCGCCTCC ACTCACATTG GTTTTCCTGG GGTCAAGATC CACGGCCTTC |
| 481 | TCAACAGACA AGAACTGAGG GCCAAAAGCT TCGTTCACGT CTATCAAATC CATGTCCTTA |
| 541 | AGACTCACCC CACCTTTCTT CAATGCTCCA TTGATACCAA GCACCTCACC AATACCCATG |
| 601 | ATAGTAGGAT CGCATCCGGA CACGAAGTAG CCCACGACTC TGGCCAAGGG CCGTGACGTT |
| 661 | TATGTTTTGA CAGCATCCTT GCTGGGCTTG ATGAGGGCCC CAGCACGTCA GACACCCCCG |
| 721 | AGGCGTATCC TTGTTTGACT GTCCCGTTTT TTTTAAACAC TGAGGGGAGC TCTTGCAGTA |
| 781 | GCTCCAGGGT GGATTTGGA |

(gene length is 799, only region from 1 to 799 shown)

### EXAMPLE D4

### Identification of Human Acetyl-Coenzyme A acyltransferase 2 Gene Sequences

[0487] The sequence of Human Acetyl-Coenzyme A acyltransferase 2 Gene (Acc. No. CG181387-01) was derived by laboratory cloning of cDNA fragments, by in silico prediction of the sequence. cDNA fragments covering either the full length of the DNA sequence, or part of the sequence, or both, were cloned. In silico prediction was based on sequences available in CuraGen's proprietary sequence databases or in the public human sequence databases, and provided either the full-length DNA sequence, or some portion thereof. The protocol for identification of human sequence(s) is disclosed in Example Q8.

[0488] Table D4 shows an alignment (ClustalW) of the protein sequences of the human (CG181387-01; SEQ ID NO:30), rat (P13437; SEQ ID NO:192) and mouse (BC028901; SEQ ID NO:193) versions of the Acetyl-Coenzyme A acyltransferase 2. Table D5 shows protein sequences of rat (P13437; SEQ ID NO:192) and mouse (BC028901; SEQ ID NO:193) versions of the Acetyl-Coenzyme A acyltransferase 2.

[image]

TABLE D5

protein sequences of rat (P13437; SEQ ID NO:192) and mouse (BC028901; SEQ
ID NO:193) versions of the Acetyl-Goenzyme A acyltransferase 2.

Rat Acetyl-Coenzyme A acyltransferase 2(P13437; SEQ ID NO:192)
MALLRGVFIVAAKRTPFGAYGGLLKDFTATDLTEFAARAALSAGKVPPETIDSVIVGNVMQSSSDAAYLA
RHVGLRVGVPTETGALTLNRLCGSGFQSIVSGCQEICSKDAEVVLCGGTESMSQSPYSVRNVRFGTKFGL
DLKLEDTLWAGLTDQHVKLPMGMTAENLAAKYNISREDCDRYALQSQQRWKAANEAGYFNEEMAPLEVKT
KKGKQTMQVDEHARPQTTLEQLQNLPPVFKKEGTVTAGNASGMSDGAGVVIIASEDAVKKHNFTPLARVV
GYFVSGCDPAIMGIGPVPAITGALKKAGLSLKDMDLIDVNEAFAPQFLAVQKSLDLDPSKTNVSGGAIAL
GHPLGGSGSRITAHLVHELRRRGGKYAVGSACIGGGQGISLIIQNTA
Mouse Acetyl-Coenzyme A acyltransferase 2 (AAH28901; BC028901; SEQ ID NO:193)
MALLRGVFIVAAKRTPFGAYGGLLKDFSATDLTEFAARAALSAGKVPPETIDSVIVGNVMQSSSDAAYLA
RHVGLRVGVPTETGALTLNRLCGSGFQSIVSGCQEICSKDAEVVLCGGTESMSQSPYCVRNVRFGTKFGL
DLKLEDTLWAGLTDQHVKLPMGMTAENLAAKYNISREDCDRYALQSQQRWKAANEAGYFNEEMAPIEVKT
KKGKQTMQVDEHARPQTTLEQLQKLPSVFKKDGTVTAGNASGVSDGAGAVIIASEDAVKKHNFTPLARVV
GYFVSGCDPTIMGIGPVPAINGALKKAGLSLKDMDLIDVNEAFAPQFLSVQKALDLDPSKTNVSGGAIAL
GHPLGGSGSRITAHLVHELRRRGGKYAVGSACIGGGQGIALIIQNTV

[0489] The laboratory cloning was performed using one or more of the methods summarized in Example Q8. The NOV4 clone was analyzed, and the nucleotide and encoded polypeptide sequences are shown in Table D6.

TABLE D6
NOV4 Sequence Analysis

| | | |
|---|---|---|
| NOV4a, CG181387-01 | SEQ ID NO:29 | 1584 bp |
| DNA Sequence | ORF Start: ATG at 49 | ORF Stop: TGA at 1240 |

GCGTCCCCCACACCACAGACCCGCGCCGCCGACGACCCAGCAGCCGCCATGCGTCTGCTCCGAGGTGT
GTTTGTAGTTGCTGCTAAGCGAACGCCCTTTGGAGCTTACGGAGGCCTTCTGAAAGACTTCACTGCTA
CTGACTTGTCTGAATTTGCTGCCAAGGCTGCCTTGTCTGCTGGCAAAGTCTCACCTGAAACAGTTGAC
AGTGTGATTATGGGCAATGTCCTGCAGAGTTCTTCAGATGCTATATATTTGGCAAGGCATGTTGGTTT
GCGTGTGGGAATCCCAAAGGAGACCCCAGCTCTCACGATTAATAGGCTCTGTGGTTCTGGTTTTCAGT
CCATTGTGAATGGATGTCAGGAAATTTGTGTTAAAGAAGCTGAAGTTGTTTTATGTGGAGGAACCGAA
AGCATGAGCCAAGCTCCCTACTGTGTCAGAAATGTGCGTTTTGGAACCAAGCTTGGATCAGATATCAA
GCTGGAAGATTCTTTATGGGTATCATTAACAGATCAGCATGTCCAGCTCCCCATGGCAATGACTGCAG
AGAATCTTACTGTAAAACACAAAATAAGCAGAGAAGAATGTGACAAATATGCCCTGCAGTCACAGCAG
AGATGGAAAGCTGCTAATGATGCTGGCTACTTTAATGATGAAATGGCACCAATTGAAGTGAAGACAAA
GAAAGGAAAACAGACAATGCAGGTAGACGAGCATGCTCGGCCCCAAACCACCCTGGAACAGTTACAGA
AACTTCCTCCAGTATTCAAGAAAGATGGAACTGTTACTGCAGGGAATGCATCGGGTGTAGCTGATGGT
GCTGGAGCTGTTATCATAGCTAGTGAAGATGCTGTTAAGAAACATAACTTCACACCACTGGCAAGAAT
TGTGGGCTACTTTGTATCTGGATGTGATCCCTCTATCATGGGTATTGGTCCTGTCCCTGCTATCAGTG
GGGCACTGAAGAAAGCAGGACTGAGTCTTAAGGACATGGATTTGGTAGAGGTGAATGAAGCTTTTGCT
CCCCAGTACTTGGCTGTTGAGAGGAGTTTGGATCTTGACATAAGTAAAACCAATGTGAATGGAGGAGC
CATTGCTTTGGGTCACCCACTGGGAGGATCTGGATCAAGAATTACTGCACACCTGGTTCACGAATTAA
GGCGTCGAGGTGGAAAATATGCCGTTGGATCAGCTTGCATTGGAGGTGGCCAAGGTATTGCTGTCATC
ATTCAGAGCACAGCCTGAAGAGACCAGTGAGCTCACTGTGACCCATCCTTACTCTACTTGGCCAGGCC
ACAGTAAAACAAGTGACCTTCAGAGCAGCTGCCACAACTGGCCATGCCCTGCCATTGAAACAGTGATT
AAGTTTGATCAAGCCATGGTGACACAAAAATGCATTGATCATGAATAGGAGCCCATGCTAGAAGTACA
TTCTCTCAGATTTGAACCAGTGAAATATGATGTATTTCTGAGCTAAAACTCAACTATAGAAGACATTA
AAAGAAATCGTATTCTTGCCAAGTAACCACCACTTCTGCCTTAGATAATATGATTATAAGGAAATCAA
ATAAATGTTGCCTTAACTTC

| | | | |
|---|---|---|---|
| NOV4a, CG181387-01 | | | |
| Protein Sequence | SEQ ID NO:30 | 397 aa | MW at 42038.9 kD |

MRLLRGVFVVAAKRTPFGAYGGLLKDFTATDLSEFAAKAALSAGKVSPETVDSVIMGNVLQSSSDAIY
LARHVGLRVGIPKETPALTINRLCGSGFQSIVNGCQEICVKEAEVVLCGGTESMSQAPYCVRNVRFGT
KLGSDIKLEDSLWVSLTDQHVQLPMAMTAENLTVKHKISREECDKYALQSQQRWKAANDAGYFNDEMA
PIEVKTKKGKQTMQVDEHARPQTTLEQLQKLPPVFKKDGTVTAGNASGVADGAGAVIIASEDAVKKHN
FTPLARIVGYFVSGCDPSIMGIGPVPAISGALKKAGLSLKDMDLVEVNEAFAPQYLAVERSLDLDISK
TNVNGGAIALGHPLGGSGSRITAHLVHELRRRGGKYAVGSACIGGGQGIAVIIQSTA

| | | |
|---|---|---|
| NOV4b, 282274427 | SEQ ID NO:31 | 1218 bp |
| DNA Sequence | ORF Start: at 2 | ORF Stop: TGA at 1205 |

CACCGGATCCACCATGCGTCTGCTCCGAGGTGTGTTTGTAGTTGCTGCTAAGCGAACGCCCTTTGGAG
CTTACGGAGGCCTTCTGAAAGACTTCACTGCTACTGACTTGTCTGAATTTGCTGCCAAGGCTGCCTTG
TCTGCTGGCAAAGTCTCACCTGAAACAGTTGACAGTGTGATTATGGGCAATGTCCTGCAGAGTTCTTC
AGATGCTATATATTTGGCAAGGCATGTTGGTTTGCGTGTGGGAATCCCAAAGGAGACCCCAGCTCTCA
CGATTAATAGGCTCTGTGGTTCTGGTTTTCAGTCCATTGTGAATGGATGTCAGGAAATTTGTGTTAAA
GAAGCTGAAGTTGTTTTATGTGGAGGAACCGAAAGCATGAGCCAAGCTCCCTACTGTGTCAGAAATGT
GCGTTTTGGAACCAAGCTTGGATCAGATATCAAGCTGGAAGATTCTTTATGGGTATCATTAACAGATC
AGCATGTCCAGCTCCCCATGGCAATGACTGCAGAGAATCTTGCTGTAAAACACAAAATAAGCAGAGAA
GAATGTGACAAATATGCCCTGCAGTCACAGCAGAGATGGAAAGCTGCTAATGATGCTGGCTACTTTAA
TGATGAAATGGCACCAATTGAAGTGAAGACAAAGAAAGGAAAACAGACAATGCAGGTAGACGAGCATG
CTCGGCCCCAAACCACCCTGGAACAGTTACAGAAACTTCCTCCAGTATTCAAGAAAGATGGAACTGTT
ACTGCAGGGAATGCATCGGGTGTAGCTGATGGTGCTGGAGCTGTTATCATAGCTAGTGAAGATGCTGT
TAAGAAACATAACTTCACACCACTGGCAAGAATTGTGGGCTACTTTGTATCTGGATGTGATCCCTCTA
TCATGGGTATTGGTCCTGTCCCTGCTATCAGTGGGGCACTGAAGAAAGCAGGACTGAGTCTTAAGGAC
ATGGATTTGGTAGAGGTGAATGAAGCTTTTGCTCCCCAGTACTTGGCTGTTGAGAGGAGTTTGGATCT
TGACATAAGTAAAACCAATGTGAATGGAGGAGCCATTGCTTTGGGTCACCCACTGGGAGGATCTGGAT
CAAGAATTACTGCACACCTGGTTCACGAATTAAGGCGTCGAGGTGGAAAATATGCCGTTGGATCAGCT
TGCATTGGAGGTGGCCAAGGTATTGCTGTCATCATTCAGAGCACAGCCTGAGCGGCCGCTAT

| | | | |
|---|---|---|---|
| NOV4b, 282274427 | | | |
| Protein Sequence | SEQ ID NO:32 | 401 aa | MW at 42355.2 kD |

TGSTMRLLRGVFVVAAKRTPFGAYGGLLKDFTATDLSEFAAKAALSAGKVSPETVDSVIMGNVLQSSS
DAIYLARHVGLRVGIPKETPALTINRLCGSGFQSIVNGCQEICVKEAEVVLCGGTESMSQAPYCVRNV
RFGTKLGSDIKLEDSLWVSLTDQHVQLPMAMTAENLAVKHKISREECDKYALQSQQRWKAANDAGYFN
DEMAPIEVKTKKGKQTMQVDEHARPQTTLEQLQKLPPVFKKDGTVTAGNASGVADGAGAVIIASEDAV
KKHNFTPLARIVGYFVSGCDPSIMGIGPVPAISGALKKAGLSLKDMDLVEVNEAFAPQYLAVERSLDL
DISKTNVNGGAIALGHPLGGSGSRITAHLVHELRRRGGKYAVGSACIGGGQGIAVIIQSTA

| | | |
|---|---|---|
| NOV4c, CG181387-02 | SEQ ID NO:33 | 1218 bp |
| DNA Sequence | ORF Start: at 2 | ORF Stop: TGA at 1205 |

CACCGGATCCACCATGCGTCTGCTCCGAGGTGTGTTTGTAGTTGCTGCTAAGCGAACGCCCTTTGGAG
CTTACGGAGGCCTTCTGAAAGACTTCACTGCTACTGACTTGTCTGAATTTGCTGCCAAGGCTGCCTTG
TCTGCTGGCAAAGTCTCACCTGAAACAGTTGACAGTGTGATTATGGGCAATGTCCTGCAGAGTTCTTC
AGATGCTATATATTTGGCAAGGCATGTTGGTTTGCGTGTGGGAATCCCAAAGGAGACCCCAGCTCTCA
CGATTAATAGGCTCTGTGGTTCTGGTTTTCAGTCCATTGTGAATGGATGTCAGGAAATTTGTGTTAAA
GAAGCTGAAGTTGTTTTATGTGGAGGAACCGAAAGCATGAGCCAAGCTCCCTACTGTGTCAGAAATGT
GCGTTTTGGAACCAAGCTTGGATCAGATATCAAGCTGGAAGATTCTTTATGGGTATCATTAACAGATC
AGCATGTCCAGCTCCCCATGGCAATGACTGCAGAGAATCTTGCTGTAAAACACAAAATAAGCAGAGAA
GAATGTGACAAATATGCCCTGCAGTCACAGCAGAGATGGAAAGCTGCTAATGATGCTGGCTACTTTAA
TGATGAAATGGCACCAATTGAAGTGAAGACAAAGAAAGGAAAACAGACAATGCAGGTAGACGAGCATG
CTCGGCCCCAAACCACCCTGGAACAGTTACAGAAACTTCCTCCAGTATTCAAGAAAGATGGAACTGTT
ACTGCAGGGAATGCATCGGGTGTAGCTGATGGTGCTGGAGCTGTTATCATAGCTAGTGAAGATGCTGT
TAAGAAACATAACTTCACACCACTGGCAAGAATTGTGGGCTACTTTGTATCTGGATGTGATCCCTCTA
TCATGGGTATTGGTCCTGTCCCTGCTATCAGTGGGGCACTGAAGAAAGCAGGACTGAGTCTTAAGGAC
ATGGATTTGGTAGAGGTGAATGAAGCTTTTGCTCCCCAGTACTTGGCTGTTGAGAGGAGTTTGGATCT
TGACATAAGTAAAACCAATGTGAATGGAGGAGCCATTGCTTTGGGTCACCCACTGGGAGGATCTGGAT
CAAGAATTACTGCACACCTGGTTCACGAATTAAGGCGTCGAGGTGGAAAATATGCCGTTGGATCAGCT
TGCATTGGAGGTGGCCAAGGTATTGCTGTCATCATTCAGAGCACAGCCTGAGCGGCCGCTAT

| | | | |
|---|---|---|---|
| NOV4c, CG181387-02 | | | |
| Protein Sequence | SEQ ID NO:34 | 401 aa | Mw at 42355.2 kD |

TGSTMRLLRGVFVVAAKRTPFGAYGGLLKDFTATDLSEFAAKAALSAGKVSPETVDSVIMGNVLQSSS
DAIYLARHVGLRVGIPKETPALTINRLCGSGFQSIVNGCQEICVKEAEVVLCGGTESMSQAPYCVRNV
RFGTKLGSDIKLEDSLWVSLTDQHVQLPMAMTAENLAVKHKISREECDKYALQSQQRWKAANDAGYFN
DEMAPIEVKTKKGKQTMQVDEHARPOTTLEQLQKLPPVFKKDGTVTAGNASGVADGAGAVIIASEDAV
KKNNFTPLARIVGYFVSGCDPSIMGIGPVPAISGALKKAGLSLKDMDLVEVNEAFAPQYLAVERSLDL
DISKTNVNGGAIALGHPLGGSGSRITAHLVHELRRRGGKYAVGSACIGGGQGIAVIIQSTA

| | | |
|---|---|---|
| NOV4d, 306268235 | SEQ ID NO:35 | 1248 bp |
| DNA Sequence | ORF Start: at 3 | ORF Stop: TGA at 1224 |

ACGCGTCTCCCATGGGACATCATCACCACCATCACCGTCTGCTCCGAGGTGTGTTTGTAGTTGCTGCT
AAGCGAACGCCCTTTGGAGCTTACGGAGGCCTTCTGAAAGACTTCACTGCTACTGACTTGTCTGAATT
TGCTGCCAAGGCTGCCTTGTCTGCTGGCAAAGTCTCACCTGAAACAGTTGACAGTGTGATTATGGGCA
ATGTCCTGCAGAGTTCTTCAGATGCTATATATTTGGCAAGGCATGTTGGTTTGCGTGTGGGAATCCCA
AAGGAGACCCCAGCTCTCACGATTAATAGGCTCTGTGGTTCTGGTTTTCAGTCCATTGTGAATGGATG
TCAGGAAATTTGTGTTAAAGAAGCTGAAGTTGTTTTATGTGGAGGAACCGAAAGCATGAGCCAAGCTC
CCTACTGTGTCAGAAATGTGCGTTTTGGAACCAAGCTTGGATCAGATATCAAGCTGGAAGATTCTTTA
TGGGTATCATTAACAGATCAGCATGTCCAGCTCCCCATGGCAATGACTGCAGAGAATCTTGCTGTAAA
ACACAAAATAAGCAGAGAAGAATGTGACAAATATGCCCTGCAGTCACAGCAGAGATGGAAAGCTGCTA
ATGATGCTGGCTACTTTAATGATGAAATGGCACCAATTGAAGTGAAGACAAAGAAAGGAAAACAGACA
ATGCAGGTAGACGAGCATGCTCGGCCCCAAACCACCCTGGAACAGTTACAGAAACTTCCTCCAGTATT
CAAGAAAGATGGAACTGTTACTGCAGGGAATGCATCGGGTGTAGCTGATGGTGCTGGAGCTGTTATCA
TAGCTAGTGAAGATGCTGTTAAGAAACATAACTTCACACCACTGGCAAGAATTGTGGGCTACTTTGTA
TCTGGATGTGATCCCTCTATCATGGGTATTGGTCCTGTCCCTGCTATCAGTGGGGCACTGAAGAAAGC
AGGACTGAGTCTTAAGGACATGGATTTGGTAGAGGTGAATGAAGCTTTTGCTCCCCAGTACTTGGCTG
TTGAGAGGAGTTTGGATCTTGACATAAGTAAAACCAATGTGAATGGAGGAGCCATTGCTTTGGGTCAC
CCACTGGGAGGATCTGGATCAAGAATTACTGCACACCTGGTTCACGAATTAAGGCGTCGAGGTGGAAA
ATATGCCGTTGGATCAGCTTGCATTGGAGGTGGCCAAGGTATTGCTGTCATCATTCAGAGCACAGCCT
GAGCAGGTGCGGCCGGAGACGAAG

| | | | |
|---|---|---|---|
| NOV4d, 306268235 | | | |
| Protein Sequence | SEQ ID NO:36 | 407 aa | MW at 43144.0 kD |

ASPMGHHHHHHRLLRGVFVVAAKRTPFGAYGGLLKDFTATDLSEFAAKAALSAGKVSPETVDSVIMGN
VLQSSSDAIYLARHVGLRVGIPKETPALTINRLCGSGFQSIVNGCQEICVKEAEVVLCGGTESMSQAP
YCVRNVRFGTKLGSDIKLEDSLWVSLTDQHVQLPMAMTAENLAVKHKISREECDKYALQSQQRWKAAN
DAGYFNDEMAPIEVKTKKGKQTMQVDEHARPQTTLEQLQKLPPVFKKDGTVTAGNASGVADGAGAVII
ASEDAVKKHNFTPLARIVGYFVSGCDPSIMGIGPVPAISGALKKAGLSLKDMDLVEVNEAFAPQYLAV
ERSLDLDISKTNVNGGAIALGHPLGGSGSRITAHLVHELRRRGGKYAVGSACIGGGQGIAVIIQSTA

| | | |
|---|---|---|
| NOV4e, CG181387-03 | SEQ ID NO:37 | 1249 bp |
| DNA Sequence | ORF Start: at 2 | ORF Stop: TGA at 1208 |

ACATCATCACCACCATCACCGTCTGCTCCGAGGTGTGTTTGTAGTTGCTGCTAAGCGAACGCCCTTTG
GAGCTTACGGAGGCCTTCTGAAAGACTTCACTGCTACTGACTTGTCTGAATTTGCTGCCAAGGCTGCC
TTGTCTGCTGGCAAAGTCTCACCTGAAACAGTTGACAGTGTGATTATGGGCAATGTCCTGCAGAGTTC
TTCAGATGCTATATATTTGGCAAGGCATGTTGGTTTGCGTGTGGGAATCCCAAAGGAGACCCCAGCTC
TCACGATTAATAGGCTCTGTGGTTCTGGTTTTCAGTCCATTGTGAATGGATGTCAGGAAATTTGTGTT
AAAGAAGCTGAAGTTGTTTTATGTGGAGGAACCGAAAGCATGAGCCAAGCTCCCTACTGTGTCAGAAA
TGTGCGTTTTGGAACCAAGCTTGGATCAGATATCAAGCTGGAAGATTCTTTATGGGTATCATTAACAG
ATCAGCATGTCCAGCTCCCCATGGCAATGACTGCAGAGAATCTTGCTGTAAAACACAAAATAAGCAGA
GAAGAATGTGACAAATATGCCCTGCAGTCACAGCAGAGATGGAAAGCTGCTAATGATGCTGGCTACTT
TAATGATGAAATGGCACCAATTGAAGTGAAGACAAAGAAAGGAAAACAGACAATGCAGGTAGACGAGC
ATGCTCGGCCCCAAACCACCCTGGAACAGTTACAGAAACTTCCTCCAGTATTCAAGAAAGATGGAACT
GTTACTGCAGGGAATGCATCGGGTGTAGCTGATGGTGCTGGAGCTGTTATCATAGCTAGTGAAGATGC
TGTTAAGAAACATAACTTCACACCACTGGCAAGAATTGTGGGCTACTTTGTATCTGGATGTGATCCCT
CTATCATGGGTATTGGTCCTGTCCCTGCTATCAGTGGGGCACTGAAGAAAGCAGGACTGAGTCTTAAG
GACATGGATTTGGTAGAGGTGAATGAAGCTTTTGCTCCCCAGTACTTGGCTGTTGAGAGGAGTTTGGA
TCTTGACATAAGTAAAACCAATGTGAATGGAGGAGCCATTGCTTTGGGTCACCCACTGGGAGGATCTG
GATCAAGAATTACTGCACACCTGGTTCACGAATTAAGGCGTCGAGGTGGAAAATATGCCGTTGGATCA
GCTTGCATTGGAGGTGGCCAAGGTATTGCTGTCATCATTCAGAGCACAGCCTGAGCAGGTGCGGCCGC
ACTCGAGCACCACCACCACCACCAC

| | | | |
|---|---|---|---|
| NOV4e, CG181387-03 | | | |
| Protein Sequence | SEQ ID NO:38 | 402 aa | MW at 42700.5 kD |

HHHHHHRLLRGVFVVAAKRTPFGAYGGLLKDFTATDLSEFAAKAALSAGKVSPETVDSVIMGNVLQSS
SDAIYLARHVGLRVGIPKETPALTINRLCGSGFQSIVNGCQEICVKEAEVVLCGGTESMSQAPYCVRN
VRFGTKLGSDIKLEDSLWVSLTDQHVQLPMAMTAENLAVKHKISREECDKYALQSQQRWKAANDAGYF
NDEMAPIEVKTKKGKQTMQVDEHARPQTTLEQLQKLPPVFKKDGTVTAGNASGVADGAGAVIIASEDA
VKKHNFTPLARIVGYFVSGCDPSIMGIGPVPAISGALKKAGLSLKDMDLVEVNEAFAPQYLAVERSLD
LDISKTNVNGGAIALGHPLGGSGSRITAHLVHELRRRGGKYAVGSACIGGGQGIAVIIQSTA

| | | |
|---|---|---|
| NOV4f, CG181387-04 | SEQ ID NO:39 | 1248 bp |
| DNA Sequence | ORF Start: at 1 | ORF Stop: TGA at 1207 |

CGTCTGCTCCGAGGTGTGTTTGTAGTTGCTGCTAAGCGAACGCCCTTTGGAGCTTACGGAGGCCTTCT
GAAAGACTTCACTGCTACTGACTTGTCTGAATTTGCTGCCAAGGCTGCCTTGTCTGCTGGCAAAGTCT
CACCTGAAACAGTTGACAGTGTGATTATGGGCAATGTCCTGCAGAGTTCTTCAGATGCTATATATTTG
GCAAGGCATGTTGGTTTGCGTGTGGGAATCCCAAAGGAGACCCCAGCTCTCACGATTAATAGGCTCTG
TGGTTCTGGTTTTCAGTCCATTGTGAATGGATGTCAGGAAATTTGTGTTAAAGAAGCTGAAGTTGTTT
TATGTGGAGGAACCGAAAGCATGAGCCAAGCTCCCTACTGTGTCAGAAATGTGCGTTTTGGAACCAAG
CTTGGATCAGATATCAAGCTGGAAGATTCTTTATGGGTATCATTAACAGATCAGCATGTCCAGCTCCC
CATGGCAATGACTGCAGAGAATCTTGCTGTAAAACACAAAATAAGCAGAGAAGAATGTGACAAATATG
CCCTGCAGTCACAGCAGAGATGGAAAGCTGCTAATGATGCTGGCTACTTTAATGATGAAATGGCACCA
ATTGAAGTGAAGACAAAGAAAGGAAAACAGACAATGCAGGTAGACGAGCATGCTCGGCCCCAAACCAC
CCTGGAACAGTTACAGAAACTTCCTCCAGTATTCAAGAAAGATGGAACTGTTACTGCAGGGAATGCAT
CGGGTGTAGCTGATGGTGCTGGAGCTGTTATCATAGCTAGTGAAGATGCTGTTAAGAAACATAACTTC
ACACCACTGGCAAGAATTGTGGGCTACTTTGTATCTGGATGTGATCCCTCTATCATGGGTATTGGTCC
TGTCCCTGCTATCAGTGGGGCACTGAAGAAAGCAGGACTGAGTCTTAAGGACATGGATTTGGTAGAGG
TGAATGAAGCTTTTGCTCCCCAGTACTTGGCTGTTGAGAGGAGTTTGGATCTTGACATAAGTAAAACC
AATGTGAATGGAGGAGCCATTGCTTTGGGTCACCCACTGGGAGGATCTGGATCAAGAATTACTGCACA
CCTGGTTCACGAATTAAGGCGTCGAGGTGGAAAATATGCCGTTGGATCAGCTTGCATTGGAGGTGGCC
AAGGTATTGCTGTCATCATTCAGAGCACAGCCCATCATCACCACCATCACTGAGCAGGTGCGGCCGCA
CTCGAGCACCACCACCACCACCAC

| | | | |
|---|---|---|---|
| NOV4f, CG181387-04 | | | |
| Protein Sequence | SEQ ID NO:40 | 402 aa | MW at 42700.5 kD |

RLLRGVFVVAAKRTPFGAYGGLLKDFTATDLSEFAAKAALSAGKVSPETVDSVIMGNVLQSSSDAIYL
ARHVGLRVGIPKETPALTINRLCGSGFQSIVNGCQEICVKEAEVVLCGGTESMSQAPYCVRNVRFGTK
LGSDIKLEDSLWVSLTDQHVQLPMAMTAENLAVKHKISREECDKYALQSQQRWKAANDAGYFNDEMAP
IEVKTKKGKQTMQVDEHARPQTTLEQLQKLPPVFKKDGTVTAGNASGVADGAGAVIIASEDAVKKHNF
TPLARIVGYFVSGCDPSIMGIGPVPAISGALKKAGLSLKDMDLVEVNEAFAPQYLAVERSLDLDISKT
NVNGGAIALGHPLGGSGSRITAHLVHELRRRGGKYAVGSACIGGGQGIAVIIQSTAHHHHHH

| | | |
|---|---|---|
| NOV4g, CG181387-05 | SEQ ID NO:41 | 1230 bp |
| DNA Sequence | ORF Start: at 1 | ORF Stop: TGA at 1189 |

CGTCTGCTCCGAGGTGTGTTTGTAGTTGCTGCTAAGCGAACGCCCTTTGGAGCTTACGGAGGCCTTCT
GAAAGACTTCACTGCTACTGACTTGTCTGAATTTGCTGCCAAGGCTGCCTTGTCTGCTGGCAAAGTCT
CACCTGAAACAGTTGACAGTGTGATTATGGGCAATGTCCTGCAGAGTTCTTCAGATGCTATATATTTG
GCAAGGCATGTTGGTTTGCGTGTGGGAATCCCAAAGGAGACCCCAGCTCTCACGATTAATAGGCTCTG
TGGTTCTGGTTTTCAGTCCATTGTGAATGGATGTCAGGAAATTTGTGTTAAAGAAGCTGAAGTTGTTT
TATGTGGAGGAACCGAAAGCATGAGCCAAGCTCCCTACTGTGTCAGAAATGTGCGTTTTGGAACCAAG
CTTGGATCAGATATCAAGCTGGAAGATTCTTTATGGGTATCATTAACAGATCAGCATGTCCAGCTCCC
CATGGCAATGACTGCAGAGAATCTTGCTGTAAAACACAAAATAAGCAGAGAAGAATGTGACAAATATG
CCCTGCAGTCACAGCAGAGATGGAAAGCTGCTAATGATGCTGGCTACTTTAATGATGAAATGGCACCA
ATTGAAGTGAAGACAAAGAAAGGAAAACAGACAATGCAGGTAGACGAGCATGCTCGGCCCCAAACCAC
CCTGGAACAGTTACAGAAACTTCCTCCAGTATTCAAGAAAGATGGAACTGTTACTGCAGGGAATGCAT
CGGGTGTAGCTGATGGTGCTGGAGCTGTTATCATAGCTAGTGAAGATGCTGTTAAGAAACATAACTTC
ACACCACTGGCAAGAATTGTGGGCTACTTTGTATCTGGATGTGATCCCTCTATCATGGGTATTGGTCC
TGTCCCTGCTATCAGTGGGGCACTGAAGAAAGCAGGACTGAGTCTTAAGGACATGGATTTGGTAGAGG
TGAATGAAGCTTTTGCTCCCCAGTACTTGGCTGTTGAGAGGAGTTTGGATCTTGACATAAGTAAAACC
AATGTGAATGGAGGAGCCATTGCTTTGGGTCACCCACTGGGAGGATCTGGATCAAGAATTACTGCACA
CCTGGTTCACGAATTAAGGCGTCGAGGTGGAAAATATGCCGTTGGATCAGCTTGCATTGGAGGTGGCC
AAGGTATTGCTGTCATCATTCAGAGCACAGCCTGAGCAGGTGCGGCCGCACTCGAGCACCACCACCAC
CACCAC

| | | | |
|---|---|---|---|
| NOV4g, CG181387-05 | | | |
| Protein Sequence | SEQ ID NO:42 | 396 aa | MW at 41877.6 kD |

RLLRGVFVVAAKRTPFGAYGGLLKDFTATDLSEFAAKAALSAGKVSPETVDSVIMGNVLQSSSDAIYL
ARHVGLRVGIPKETPALTINRLCGSGFQSIVNGCQEICVKEAEVVLCGGTESMSQAPYCVRNVRFGTK
LGSDIKLEDSLWVSLTDQHVQLPMAMTAENLAVKHKISREECDKYALQSQQRWKAANDAGYFNDEMAP
IEVKTKKGKQTMQVDEHARPQTTLEQLQKLPPVFKKDGTVTAGNASGVADGAGAVIIASEDAVKKHNF
TPLARIVGYFVSGCDPSIMGIGPVPAISGALKKAGLSLKDMDLVEVNEAFAPQYLAVERSLDLDISKT
NVNGGAIALGHPLGGSGSRITAHLVHELRRRGGKYAVGSACIGGGQGIAVIIQSTA

| | | |
|---|---|---|
| NOV4h, GG181387-06 | SEQ ID NO:43 | 1221 bp |
| DNA Sequence | ORF Start: ATG at 4 | ORF Stop: at 1195 |

ACCATGCGTCTGCTCCGAGGTGTGTTTGTAGTTGCTGCTAAGCGAACGCCCTTTGGAGCTTACGGAGG
CCTTCTGAAAGACTTCACTGCTACTGACTTGTCTGAATTTGCTGCCAAGGCTGCCTTGTCTGCTGGCA
AAGTCTCACCTGAAACAGTTGACAGTGTGATTATGGGCAATGTCCTGCAGAGTTCTTCAGATGCTATA
TATTTGGCAAGGCATGTTGGTTTGCGTGTGGGAATCCCAAAGGAGACCCCAGCTCTCACGATTAATAG
GCTCTGTGGTTCTGGTTTTCAGTCCATTGTGAATGGATGTCAGGAAATTTGTGTTAAAGAAGCTGAAG
TTGTTTTATGTGGAGGAACCGAAAGCATGAGCCAAGCTCCCTACTGTGTCAGAAATGTGCGTTTTGGA
ACCAAGCTTGGATCAGATATCAAGCTGGAAGATTCTTTATGGGTATCATTAACAGATCAGCATGTCCA
GCTCCCCATGGCAATGACTGCAGAGAATCTTGCTGTAAAACACAAAATAAGCAGAGAAGAATGTGACA
AATATGCCCTGCAGTCACAGCAGAGATGGAAAGCTGCTAATGATGCTGGCTACTTTAATGATGAAATG
GCACCAATTGAAGTGAAGACAAAGAAAGGAAAACAGACAATGCAGGTAGACGAGCATGCTCGGCCCCA
AACCACCCTGGAACAGTTACAGAAACTTCCTCCAGTATTCAAGAAAGATGGAACTGTTACTGCAGGGA
ATGCATCGGGTGTAGCTGATGGTGCTGGAGCTGTTATCATAGCTAGTGAAGATGCTGTTAAGAAACAT
AACTTCACACCACTGGCAAGAATTGTGGGCTACTTTGTATCTGGATGTGATCCCTCTATCATGGGTAT
TGGTCCTGTCCCTGCTATCAGTGGGGCACTGAAGAAAGCAGGACTGAGTCTTAAGGACATGGATTTGG
TAGAGGTGAATGAAGCTTTTGCTCCCCAGTACTTGGCTGTTGAGAGGAGTTTGGATCTTGACATAAGT
AAAACCAATGTGAATGGAGGAGCCATTGCTTTGGGTCACCCACTGGGAGGATCTGGATCAAGAATTAC
TGCACACCTGGTTCACGAATTAAGGCGTCGAGGTGGAAAATATGCCGTTGGATCAGCTTGCATTGGAG
GTGGCCAAGGTATTGCTGTCATCATTCAGAGCACAGCCCATCATCACCACCATCACTGAGCAGGT

| | | | |
|---|---|---|---|
| NOV4h, CG181387-06 | | | |
| Protein Sequence | SEQ ID NO:44 | 397 aa | MW at42008.8 kD |

MRLLRGVFVVAAKRTPFGAYGGLLKDFTATDLSEFAAKAALSAGKVSPETVDSVIMGNVLQSSSDAIY
LARHVGLRVGIPKETPALTINRLCGSGFQSIVNGCQEICVKEAEVVLCGGTESMSQAPYCVRNVRFGT
KLGSDIKLEDSLWVSLTDQHVQLPMAMTAEMLAVKHKISREECDKYALQSQQRWKAANDAGYFNDEMA
PIEVKTKKGKQTMQVDEHARPQTTLEQLQKLPPVFKKDGTVTAGNASGVADGAGAVIIASEDAVKKHN
FTPLARIVGYFVSGCDPSIMGIGPVPAISGALKKAGLSLKDMDLVEVNEAFAPQYLAVERSLDLDISK
TNVNGGAIALGHPLGGSGSRITAHLVHELRRRGGKYAVGSACIGGGQGIAVIIQSTA

[0490] A ClustalW comparison of the above protein sequences yields the following sequence alignment shown in Table D7.

TABLE D7
Comparison of the NOV4 protein sequences.

| | |
|---|---|
| NOV4a | ——————————MRLLRGVFVVAAKRTPFGAYGGLLKDFTATDLSEFAAKAALSAGKVSPET |
| NOV4b | ——————TGSTMRLLRGVFVVAAKRTPFGAYGGLLKDFTATDLSEFAAKAALSAGKVSPET |
| NOV4c | ——————TGSTMRLLRGVFVVAAKRTPFGAYGGLLKDFTATDLSEFAAKAALSAGKVSPET |
| NOV4d | ASPMGHHHHHHRLLRGVFVVAAKRTPFGAYGGLLKDFTATDLSEFAAKAALSAGKVSPET |
| NOV4e | —————HHHHHHRLLRGVFVVAAKRTPFGAYGGLLKDFTATDLSEFAAKAALSAGKVSPET |
| NOV4f | ———————————RLLRGVFVVAAKRTPFGAYGGLLKDFTATDLSEFAAKAALSAGKVSPET |
| NOV4g | ———————————RLLRGVFVVAAKRTPFGAYGGLLKDFTATDLSEFAAKAALSAGKVSPET |
| NOV4h | ——————————MRLLRGVFVVAAKRTPFGAYGGLLKDFTATDLSEFAAKAALSAGKVSPET |
| NOV4a | VDSVIMGNVLQSSSDAIYLARHVGLRVGIPKETPALTINRLCGSGFQSIVNGCQEICVKE |
| NOV4b | VDSVIMGNVLQSSSDAIYLARHVGLRVGIPKETPALTINRLCGSGFQSIVNGCQEICVKE |
| NOV4c | VDSVIMGNVLQSSSDAIYLARHVGLRVGIPKETPALTINRLCGSGFQSIVNGCQEICVKE |
| NOV4d | VDSVIMGNVLQSSSDAIYLARHVGLRVGIPKETPALTINRLCGSGFQSIVNGCQEICVKE |
| NOV4e | VDSVIMGNVLQSSSDAIYLARHVGLRVGIPKETPALTINRLCGSGFQSIVNGCQEICVKE |
| NOV4f | VDSVIMGNVLQSSSDAIYLARHVGLRVGIPKETPALTINRLCGSGFQSIVNGCQEICVKE |
| NOV4g | VDSVIMGNVLQSSSDAIYLARHVGLRVGIPKETPALTINRLCGSGFQSIVNGCQEICVKE |
| NOV4h | VDSVIMGNVLQSSSDAIYLARHVGLRVGIPKETPALTINRLCGSGFQSIVNGCQEICVKE |
| NOV4a | AEVVLCGGTESMSQAPYCVRNVRFGTKLGSDIKLEDSLWVSLTDQHVQLPMAMTAENLTV |
| NOV4b | AEVVLCGGTESMSQAPYCVRNVRFGTKLGSDIKLEDSLWVSLTDQHVQLPMAMTAENLAV |
| NOV4c | AEVVLCGGTESMSQAPYCVRNVRFGTKLGSDIKLEDSLWVSLTDQHVQLPMAMTAENLAV |
| NOV4d | AEVVLCGGTESMSQAPYCVRNVRFGTKLGSDIKLEDSLWVSLTDQHVQLPMAMTAENLAV |
| NOV4e | AEVVLCGGTESMSQAPYCVRNVRFGTKLGSDIKLEDSLWVSLTDQHVQLPMAMTAENLAV |
| NOV4f | AEVVLCGGTESMSQAPYCVRNVRFGTKLGSDIKLEDSLWVSLTDQHVQLPMAMTAENLAV |
| NOV4g | AEVVLCGGTESMSQAPYCVRNVRFGTKLGSDIKLEDSLWVSLTDQHVQLPMAMTAENLAV |
| NOV4h | AEVVLCGGTESMSQAPYCVRNVRFGTKLGSDIKLEDSLWVSLTDQHVQLPMAMTAENLAV |
| NOV4a | KHKISREECDKYALQSQQRWKAANDAGYFNDEMAPIEVKTKKGKQTMQVDEHARPQTTLE |
| NOV4b | KHKISREECDKYALQSQQRWKAANDAGYFNDEMAPIEVKTKKGKQTMQVDEHARPQTTLE |
| NOV4c | KHKISREECDKYALQSQQRWKAANDAGYFNDEMAPIEVKTKKGKQTMQVDEHARPQTTLE |
| NOV4d | KHKISREECDKYALQSQQRWKAANDAGYFNDEMAPIEVKTKKGKQTMQVDEHARPQTTLE |
| NOV4e | KHKISREECDKYALQSQQRWKAANDAGYFNDEMAPIEVKTKKGKQTMQVDEHARPQTTLE |
| NOV4f | KHKISREECDKYALQSQQRWKAANDAGYFNDEMAPIEVKTKKGKQTMQVDEHARPQTTLE |
| NOV4g | KHKISREECDKYALQSQQRWKAANDAGYFNDEMAPIEVKTKKGKQTMQVDEHARPQTTLE |
| NOV4h | KHKISREECDKYALQSQQRWKAANDAGYFNDEMAPIEVKTKKGKQTMQVDEHARPQTTLE |
| NOV4a | QLQKLPPVFKKDGTVTAGNASGVADGAGAVIIASEDAVKKHNFTPLARIVGYFVSGCDPS |
| NOV4b | QLQKLPPVFKKDGTVTAGNASGVADGAGAVIIASEDAVKKHNFTPLARIVGYFVSGCDPS |
| NOV4c | QLQKLPPVFKKDGTVTAGNASGVADGAGAVIIASEDAVKKHNFTPLARIVGYFVSGCDPS |
| NOV4d | QLQKLPPVFKKDGTVTAGNASGVADGAGAVIIASEDAVKKHNFTPLARIVGYFVSGCDPS |
| NOV4e | QLQKLPPVFKKDGTVTAGNASGVADGAGAVIIASEDAVKKHNFTPLARIVGYFVSGCDPS |
| NOV4f | QLQKLPPVFKKDGTVTAGNASGVADGAGAVIIASEDAVKKHNFTPLARIVGYFVSGCDPS |
| NOV4g | QLQKLPPVFKKDGTVTAGNASGVADGAGAVIIASEDAVKKHNFTPLARIVGYFVSGCDPS |
| NOV4h | QLQKLPPVFKKDGTVTAGNASGVADGAGAVIIASEDAVKKHNFTPLARIVGYFVSGCDPS |
| NOV4a | IMGIGPVPAISGALKKAGLSLKDMDLVEVNEAFAPQYLAVERSLDLDISKTNVNGGAIAL |
| NOV4b | IMGIGPVPAISGALKKAGLSLKDMDLVEVNEAFAPQYLAVERSLDLDISKTNVNGGAIAL |
| NOV4c | IMGIGPVPAISGALKKAGLSLKDMDLVEVNEAFAPQYLAVERSLDLDISKTNVNGGAIAL |
| NOV4d | IMGIGPVPAISGALKKAGLSLKDMDLVEVNEAFAPQYLAVERSLDLDISKTNVNGGAIAL |
| NOV4e | IMGIGPVPAISGALKKAGLSLKDMDLVEVNEAFAPQYLAVERSLDLDISKTNVNGGAIAL |
| NOV4f | IMGIGPVPAISGALKKAGLSLKDMDLVEVNEAFAPQYLAVERSLDLDISKTNVNGGAIAL |
| NOV4g | IMGIGPVPAISGALKKAGLSLKDMDLVEVNEAFAPQYLAVERSLDLDISKTNVNGGAIAL |
| NOV4h | IMGIGPVPAISGALKKAGLSLKDMDLVEVNEAFAPQYLAVERSLDLDISKTNVNGGAIAL |
| NOV4a | GHPLGGSGSRITAHLVHELRRRGGKYAVGSACIGGGQGIAVIIQSTA—————— |
| NOV4b | GHPLGGSGSRITAHLVHELRRRGGKYAVGSACIGGGQGIAVIIQSTA—————— |
| NOV4c | GHPLGGSGSRITAHLVHELRRRGGKYAVGSACIGGGQGIAVIIQSTA—————— |
| NOV4d | GHPLGGSGSRITAHLVHELRRRGGKYAVGSACIGGGQGIAVIIQSTA—————— |
| NOV4e | GHPLGGSGSRITAHLVHELRRRGGKYAVGSACIGGGQGIAVIIQSTA—————— |
| NOV4f | GHPLGGSGSRITAHLVHELRRRGGKYAVGSACIGGGQGIAVIIQSTAHHHHHH |
| NOV4g | GHPLGGSGSRITAHLVHELRRRGGKYAVGSACIGGGQGIAVIIQSTA—————— |
| NOV4h | GHPLGGSGSRITAHLVHELRRRGGKYAVGSACIGGGQGIAVIIQSTA—————— |
| NOV4a | (SEQ ID NO:30) |
| NOV4b | (SEQ ID NO:32) |
| NOV4c | (SEQ ID NO:34) |
| NOV4d | (SEQ ID NO:36) |
| NOV4e | (SEQ ID NO:38) |
| NOV4f | (SEQ ID NO:40) |
| NOV4g | (SEQ ID NO:42) |
| NOV4h | (SEQ ID NO:44) |

[0491] Further analysis of the NOV4a protein yielded the following properties shown in Table D8.

TABLE D8
Protein Sequence Properties NOV4a

| SignalP | Cleavage site between residues 19 and 20 | | | |
|---|---|---|---|---|
| analysis: | | | | |
| PSORT II | PSG: a new signal peptide prediction method | | | |
| analysis: | N-region: length 5; pos. chg 2; neg. chg 0 | | | |
| | H-region: length 7; peak value 3.62 | | | |
| | PSG score: −0.78 | | | |
| | GvH: von Heijne's method for signal seq. recognition | | | |
| | GvH score (threshold: −2.1): −7.58 | | | |
| | possible cleavage site: between 48 and 49 | | | |
| | >>> Seems to have no N-terminal signal peptide | | | |
| | ALOM: Klein et al's method for TM region allocation | | | |
| | Init position for calculation: 1 | | | |
| | Tentative number of TMS(s) for the threshold 0.5: 1 | | | |
| | Number of TMS(s) for threshold 0.5: 0 | | | |
| | PERIPHERAL Likelihood = 3.92 (at 279) | | | |
| | ALOM score: −0.59 (number of TMSs: 0) | | | |
| | MITDISC: discrimination of mitochondrial targeting seq | | | |
| | R content: | 3 | Hyd Moment(75): | 6.86 |
| | Hyd Moment(95): | 13.09 | G content: | 4 |
| | D/E content: | 1 | S/T content: | 1 |

```
Score: −2.94
Gavel: prediction of cleavage sites for mitochondrial preseq
R-2 motif at 24 KRT|PF
NUCDISC: discrimination of nuclear localization signals
pat4: none
pat7: none
bipartite: none
content of basic residues: 10.8%
NLS Score: −0.47
KDEL: ER retention motif in the C-terminus: none
ER Membrane Retention Signals:
XXRR-like motif in the N-terminus: RLLR
none
SKL: peroxisomal targeting signal in the C-terminus: none
PTS2: 2nd peroxisomal targeting signal: none
VAC: possible vacuolar targeting motif: none
RNA-binding motif: none
Actinin-type actin-binding motif:
type 1: none
type 2: none
NMYR: N-myristoylation pattern: none
Prenylation motif: none
memYQRL: transport motif from cell surface to Golgi: none
Tyrosines in the tail: none
Dileucine motif in the tail: none
checking 63 PROSITE DNA binding motifs: none
checking 71 PROSITE ribosomal protein motifs: none
checking 33 PROSITE prokaryotic DNA binding motifs: none
NNCN: Reinhardt's method for Cytoplasmic/Nuclear
discrimination
Prediction: cytoplasmic
Reliability: 94.1
COIL: Lupas's algorithm to detect coiled-coil regions
total: 0 residues
Final Results (k = 9/23):
47.8%: mitochondrial
34.8%: cytoplasmic
  8.7%: nuclear
  4.3%: vacuolar
  4.3%: peroxisomal
>> prediction for CG181387-01 is mit (k = 23)
```

[0492] A search of the NOV4a protein against the Geneseq database, a proprietary database that contains sequences published in patents and patent publication, yielded several homologous proteins shown in Table D9.

TABLE D9
Geneseq Results for NOV4a

| | | NOV4a | Identities/ | |
|---|---|---|---|---|
| | | Residues/ | Similarities for | |
| Geneseq | Protein/Organism/Length | Match | the Matched | Expect |
| Identifier | [Patent #, Date] | Residues | Region | Value |
| ABB89415 | Human polypeptide SEQ ID NO | 1 . . . 397 | 395/397 (99%) | 0.0 |
| | 1791 - Homo sapiens, 397 aa. | 1 . . . 397 | 395/397 (99%) | |
| | [WO200190304-A2, 29-NOV-2001] | | | |
| AAU23202 | Novel human enzyme polypeptide | 1 . . . 397 | 395/397 (99%) | 0.0 |
| | #288 - Homo sapiens, 438 aa. | 42 . . . 438 | 395/397 (99%) | |
| | [WO200155301-A2, 02-AUG-2001] | | | |
| AAB53323 | Human colon cancer antigen protein | 1 . . . 397 | 395/397 (99%) | 0.0 |
| | sequence SEQ ID NO: 863 - Homo | 42 . . . 438 | 395/397 (99%) | |
| | sapiens, 438 aa. [WO200055351-A1, | | | |
| | 21-SEP-2000] | | | |
| ABR48490 | Human Ketothiolase - Homo sapiens, | 4 . . . 397 | 391/394 (99%) | 0.0 |
| | 394 aa. [WO200294864-A2, 28-NOV-2002] | 1 . . . 394 | 392/394 (99%) | |
| ABB60752 | Drosophila melanogaster polypeptide | 5 . . . 395 | 233/392 (59%) | e−131 |
| | SEQ ID NO 9048 - Drosophila | 6 . . . 397 | 292/392 (74%) | |
| | melanogaster, 398 aa. | | | |
| | [WO200171042-A2, 27-SEP-2001] | | | |

[0493] In a BLAST search of public sequence databases, the NOV4a protein was found to have homology to the proteins shown in the BLASTP data in Table D10.

TABLE D10
Public BLASTP Results for NOV4a

| | | NOV4a | Identities/ | |
|---|---|---|---|---|
| Protein | | Residues/ | Similarities for | |
| Accession | | Match | the Matched | Expect |
| Number | Protein/Organism/Length | Residues | Portion | Value |
| P42765 | 3-ketoacyl-CoA thiolase, | 1 . . . 397 | 397/397 (100%) | 0.0 |
| | mitochondrial (EC 2.3.1.16) (Beta- | 1 . . . 397 | 397/397 (100%) | |
| | ketothiolase) (Acetyl-CoA | | | |
| | oxoacyl-CoA thiolase) (T1) - Homo | | | |
| | sapiens (Human), 397 aa. | | | |
| Q9BUT6 | Acetyl-coenzyme A acyltransferase 2 | 1 . . . 397 | 395/397 (99%) | 0.0 |
| | (Mitochondrial 3-oxoacyl-coenzyme | 1 . . . 397 | 395/397 (99%) | |
| | A thiolase) - Homo sapiens (Human), | | | |
| | 397 aa. | | | |
| CAD67660 | Sequence 75 from Patent | 4 . . . 397 | 391/394 (99%) | 0.0 |
| | WO02094864 - Homo sapiens | 1 . . . 394 | 392/394 (99%) | |
| | (Human), 394 aa. | | | |
| Q8BWT1 | 3-ketoacyl-CoA thiolase - Mus | 1 . . . 397 | 347/397 (87%) | 0.0 |
| | musculus (Mouse), 397 aa. | 1 . . . 397 | 381/397 (95%) | |
| Q8JZR8 | Similar to acetyl-coenzyme A | 1 . . . 396 | 346/396 (87%) | 0.0 |
| | acyltransferase 2 (Mitochondrial 3- | 1 . . . 396 | 380/396 (95%) | |
| | oxoacyl-coenzyme A thiolase) - Mus | | | |
| | musculus (Mouse), 397 aa. | | | |

[0494] PFam analysis predicts that the NOV4a protein contains the domains shown in the Table D11.

TABLE D11
Domain Analysis of NOV4a

| | | Identities/ | |
|---|---|---|---|
| | NOV4a | Similarities for | |
| Pfam Domain | Match Region | the Matched Region | Expect Value |
| thiolase | 4 . . . 266 | 127/274 (46%) | 1.4e−147 |
| | | 242/274 (88%) | |
| thiolase_C | 271 . . . 395 | 81/142 (57%) | 1.3e−77 |
| | | 119/142 (84%) | |
| ketoacyl-synt_C | 276 . . . 397 | 29/188 (15%) | 0.31 |
| | | 76/188 (40%) | |

### EXAMPLE D5

### Human Acetyl-Coenzyme A acyltransferase 2 Gene Variants and SNPs

[0495] Variant sequences are included in this application. A variant sequence can include a single nucleotide polymorphism (SNP). A SNP can, in some instances, be referred to as a “cSNP” to denote that the nucleotide sequence containing the SNP originates as a cDNA. A SNP can arise in several ways. For example, a SNP may be due to a substitution of one nucleotide for another at the polymorphic site. Such a substitution can be either a transition or a transversion. A SNP can also arise from a deletion of a nucleotide or an insertion of a nucleotide, relative to a reference allele. In this case, the polymorphic site is a site at which one allele bears a gap with respect to a particular nucleotide in another allele. SNPs occurring within genes may result in an alteration of the amino acid encoded by the gene at the position of the SNP. Intragenic SNPs may also be silent, however, in the case that a codon including a SNP encodes the same amino acid as a result of the redundancy of the genetic code. SNPs occurring outside the region of a gene, or in an intron within a gene, do not result in changes in any amino acid sequence of a protein but may result in altered regulation of the expression pattern for example, alteration in temporal expression, physiological response regulation, cell type expression regulation, intensity of expression, stability of transcribed message.

[0496] Method of novel SNP Identification: SNPs are identified by analyzing sequence assemblies using CuraGen's proprietary SNPTool algorithm. SNPTool identifies variation in assemblies with the following criteria: SNPs are not analyzed within 10 base pairs on both ends of an alignment; Window size (number of bases in a view) is 10; The allowed number of mismatches in a window is 2; Minimum SNP base quality (PHRED score) is 23; Minimum number of changes to score an SNP is 2/assembly position. SNPTool analyzes the assembly and displays SNP positions, associated individual variant sequences in the assembly, the depth of the assembly at that given position, the putative assembly allele frequency, and the SNP sequence variation. Sequence traces are then selected and brought into view for manual validation. The consensus assembly sequence is imported into CuraTools along with variant sequence changes to identify potential amino acid changes resulting from the SNP sequence variation. Comprehensive SNP data analysis is then exported into the SNPCalling database.

[0497] Method of novel SNP Confirmafion: SNPs are confirmed employing a validated method know as Pyrosequencing. Detailed protocols for Pyrosequencing can be found in: Alderborn et al. Determination of Single Nucleotide Polymorphisms by Real-time Pyrophosphate DNA Sequencing. (2000). Genome Research. 10, Issue 8, August. 1249-1265.

[0498] In brief, Pyrosequencing is a real time primer extension process of genotyping. This protocol takes double-stranded, biotinylated PCR products from genomic DNA samples and binds them to streptavidin beads. These beads are then denatured producing single stranded bound DNA. SNPs are characterized utilizing a technique based on an indirect bioluminometric assay of pyrophosphate (PPi) that is released from each dNTP upon DNA chain elongation. Following Klenow polymerase-mediated base incorporation, PPi is released and used as a substrate, together with adenosine 5′-phosphosulfate (APS), for ATP sulfurylase, which results in the formation of ATP. Subsequently, the ATP accomplishes the conversion of luciferin to its oxi-derivative by the action of luciferase. The ensuing light output becomes proportional to the number of added bases, up to about four bases. To allow processivity of the method dNTP excess is degraded by apyrase, which is also present in the starting reaction mixture, so that only dNTPs are added to the template during the sequencing. The process has been fully automated and adapted to a 96-well format, which allows rapid screening of large SNP panels.

Results

[0499] The DNA and protein sequences for the novel single nucleotide polymorphic variants of the Acetyl-Coenzyme A acyltransferase 2-like gene of CuraGen Acc. No. CG181387-01 are reported in Table D10. Variants are reported individually but any combination of all or a select subset of variants are also included. In Table D10, the positions of the variant bases and the variant amino acid residues are underlined. In summary, there are 6 variants reported in Table D10. Variant 13380063 is an A to G SNP at 697 bp of the nucleotide sequence that results in a Met to Val change at amino acid 217 of protein sequence, variant 13380064 is an A to G SNP at 1250 bp of the nucleotide sequence that results in no change in the protein sequence since the SNP is not in the amino acid coding region, variant 13380065 is an A to G SNP at 1451 bp of the nucleotide sequence that results in no change in the protein sequence since the SNP is not in the amino acid coding region, variant 13380066 is a C to T SNP at 1466 bp of the nucleotide sequence that results in no change in the protein sequence since the SNP is not in the amino acid coding region, variant 13380067 is an A to C SNP at 1525 bp of the nucleotide sequence that results in no change in the protein sequence since the SNP is not in the amino acid coding region, and variant 13380068 is a T to C SNP at 1550 bp of the nucleotide sequence that results in no change in the protein sequence since the SNP is not in the amino acid coding region.

TABLE D10
Variants of nucleotide sequence Acc.
No. CG181387-01 (SEQ ID NO: 29)

| | Nucleotides | | | Amino Acids | | |
|---|---|---|---|---|---|---|
| Variant | Position | Initial | Modified | Position | Initial | Modified |
| 13380063 | 697 | A | G | 217 | Met | Val |
| 13380064 | 1250 | A | G | 0 | | |
| 13380065 | 1451 | A | G | 0 | | |
| 13380066 | 1466 | C | T | 0 | | |
| 13380067 | 1525 | A | C | 0 | | |
| 13380068 | 1550 | T | C | 0 | | |

[0500] TABLE D11
Sequences of Variants

Table D11A1.
Nucleotide sequence of variant 13380063 NOV4a1n (underlined). A/G
(SEQ ID NO:155)

| | |
|---|---|
| 1 | GCGTCCCCCACACCACAGACCCGCGCCGCCGACGACCCAGCAGCCGCCATGCGTCTGCTCCGAGGTGTGTTTGTAGTTGC |
| 81 | TGCTAAGCGAACGCCCTTTGGAGCTTACGGAGGCCTTCTGAAAGACTTCACTGCTACTGACTTGTCTGAATTTGCTGCCA |
| 161 | AGGCTGCCTTGTCTGCTGGCAAAGTCTCACCTGAAACAGTTGACAGTGTGATTATGGGCAATGTCCTGCAGAGTTCTTCA |
| 241 | GATGCTATATATTTGGCAAGGCATGTTGGTTTGCGTGTGGGAATCCCAAAGGAGACCCCAGCTCTCACGATTAATAGGCT |
| 321 | CTGTGGTTCTGGTTTTCAGTCCATTGTGAATGGATGTCAGGAAATTTGTGTTAAAGAAGCTGAAGTTGTTTTATGTGGAG |
| 401 | GAACCGAAAGCATGAGCCAAGCTCCCTACTGTGTCAGAAATGTGCGTTTTGGAACCAAGCTTGGATCAGATATCAAGCTG |
| 481 | GAAGATTCTTTATGGGTATCATTAACAGATCAGCATGTCCAGCTCCCCATGGCAATGACTGCAGAGAATCTTACTGTAAA |
| 561 | ACACAAAATAAGCAGAGAAGAATGTGACAAATATGCCCTGCAGTCACAGCAGAGATGGAAAGCTGCTAATGATGCTGGCT |
| 641 | ACTTTAATGATGAAATGGCACCAATTGAAGTGAAGACAAAGAAAGGAAAACAGACAGTGCAGGTAGACGAGCATGCTCGG |
| 721 | CCCCAAACCACCCTGGAACAGTTACAGAAACTTCCTCCAGTATTCAAGAAAGATGGAACTGTTACTGCAGGGAATGCATC |
| 801 | GGGTGTAGCTGATGGTGCTGGAGCTGTTATCATAGCTAGTGAAGATGCTGTTAAGAAACATAACTTCACACCACTGGCAA |
| 881 | GAATTGTGGGCTACTTTGTATCTGGATGTGATCCCTCTATCATGGGTATTGGTCCTGTCCCTGCTATCAGTGGGGCACTG |
| 961 | AAGAAAGCAGGACTGAGTCTTAAGGACATGGATTTGGTAGAGGTGAATGAAGCTTTTGCTCCCCAGTACTTGGCTGTTGA |
| 1041 | GAGGAGTTTGGATCTTGACATAAGTAAAACCAATGTGAATGGAGGAGCCATTGCTTTGGGTCACCCACTGGGAGGATCTG |
| 1121 | CATCAAGAATTACTGCACACCTGGTTCACGAATTAAGGCGTCGAGGTGGAAAATATGCCGTTGGATCAGCTTGTATTGGA |
| 1201 | GGTGGCCAAGGTATTGCTGTCATCATTCAGAGCACAGCCTGAAGAGACCAGTGAGCTCACTGTGACCCATCCTTACTCTA |
| 1281 | CTTGGCCAGGCCACAGTAAAACAAGTGACCTTCAGAGCAGCTGCCACAACTGGCCATGCCCTGCCATTGAAACAGTGATT |
| 1361 | AAGTTTGATCAAGCCATGGTGACACAAAAATGCATTGATCATGAATAGGAGCCCATGCTAGAAGTACATTCTCTCAGATT |
| 1441 | TGAACCAGTGAAATATGATGTATTTCTGAGCTAAAACTCAACTATAGAAGACATTAAAAGAAATCGTATTCTTGCCAAGT |
| 1521 | AACCACCACTTCTGCCTTAGATAATATGATTATAAGGAAATCAAATAAATGTTGCCTTAACTTC |

Table D11A2.
Protein sequence of variant NOV4a1p (underlined). (SEQ ID NO:156)

| | |
|---|---|
| 1 | MRLLRGVFVVAAKRTPFGAYGGLLKDFTATDLSEFAAKAALSAGKVSPETVDSVIMGNVLQSSSDAIYLARHVGLRVGIP |
| 81 | KETPALTINRLCGSGFQSIVNGCQEICVKEAEVVLCGGTESMSQAPYCVRNVRFGTKLGSDIKLEDSLWVSLTDQHVQLP |
| 161 | MANTAENLTVKHKISREECDKYALQSQQRWKAANDAGYFNDEMAPIEVKTKKGKQTVQVDEHARPQTTLEQLQKLPPVFK |
| 241 | KDGTVTAGNASGVADGAGAVIIASEDAVKKHNFTPLARIVGYFVSGCDPSIMGIGPVPAISGALKKAGLSLKDMDLVEVN |
| 321 | EAFAPQYLAVERSLDLDISKTNVNGGAIALGHPLGGSGSRITAHLVHELRRRGGKYAVGSACIGGGQGIAVIIQSTA |

Table D11A3. Alteration effect
Met to Val
Table D11B1.
Nucleotide sequence of variant 13380064 NOV4a2n (underlined). A/G
(SEQ ID NO:157)

| | |
|---|---|
| 1 | GCGTCCCCCACACCACAGACCCGCGCCGCCGACGACCCAGCAGCCGCCATGCGTCTGCTCCGAGGTGTGTTTGTAGTTGC |
| 81 | TGCTAAGCGAACGCCCTTTGGAGCTTACGGAGGCCTTCTGAAAGACTTCACTGCTACTGACTTGTCTGAATTTGCTGCCA |
| 161 | AGGCTGCCTTGTCTGCTGGCAAAGTCTCACCTGAAACAGTTGACAGTGTGATTATGGGCAATGTCCTGCAGAGTTCTTCA |
| 241 | GATGCTATATATTTGGCAAGGCATGTTGGTTTGCGTGTGGGAATCCCAAAGGAGACCCCAGCTCTCACGATTAATAGGCT |
| 321 | CTGTGGTTCTGGTTTTCAGTCCATTGTGAATGGATGTCAGGAAATTTGTGTTAAAGAAGCTGAAGTTGTTTTATGTGGAG |
| 401 | GAACCGAAAGCATGAGCCAAGCTCCCTACTGTGTCAGAAATGTGCGTTTTGGAACCAAGCTTGGATCAGATATCAAGCTG |
| 481 | GAAGATTCTTTATGGGTATCATTAACAGATCAGCATGTCCAGCTCCCCATGGCAATGACTGCAGAGAATCTTACTGTAAA |
| 561 | ACACAAAATAAGCAGAGAAGAATGTGACAAATATGCCCTGCAGTCACAGCAGAGATGGAAAGCTGCTAATGATGCTGGCT |
| 641 | ACTTTAATGATGAAATGGCACCAATTGAAGTGAAGACAAAGAAAGGAAAACAGACAATGCAGGTAGACGAGCATGCTCGG |
| 721 | CCCCAAACCACCCTGGAACAGTTACAGAAACTTCCTCCAGTATTCAAGAAAGATGGAACTGTTACTGCAGGGAATGCATC |
| 801 | GGGTGTAGCTGATGGTGCTGGAGCTGTTATCATAGCTAGTGAAGATGCTGTTAAGAAACATAACTTCACACCACTGGCAA |
| 881 | GAATTGTGGGCTACTTTGTATCTGGATGTGATCCCTCTATCATGGGTATTGGTCCTGTCCCTGCTATGAGTGGGGCACTG |
| 961 | AAGAAAGCAGGACTGAGTCTTAAGGACATGGATTTGGTAGAGGTGAATGAAGCTTTTGCTCCCCAGTACTTGGCTGTTGA |
| 1041 | GAGGAGTTTGGATCTTGACATAAGTAAAACCAATGTGAATGGAGGAGCCATTGCTTTGGGTCACCCACTGGGAGGATCTG |
| 1121 | GATCAAGAATTACTGCACACCTGGTTCACGAATTAAGGCGTCGAGGTGGAAAATATGCCGTTGGATCAGCTTGCATTGGA |
| 1201 | GGTGGCCAAGGTATTGCTGTCATCATTCAGAGCACAGCCTGAAGAGACCGGTGAGCTCACTGTGACCCATCCTTACTCTA |
| 1281 | CTTGGCCAGGCCACAGTAAAACAAGTGACCTTCAGAGCAGCTGCCACAACTGGCCATGCCCTGCCATTGAAACAGTGATT |
| 1361 | AAGTTTGATCAAGCCATGGTGACACAAAAATGCATTGATCATGAATAGGAGCCCATGCTAGAAGTACATTCTCTCAGATT |
| 1441 | TGAACCAGTGAAATATGATGTATTTCTGAGCTAAAACTCAACTATAGAAGACATTAAAAGAAATCGTATTCTTGCCAAGT |
| 1521 | AACCACCACTTCTGCCTTAGATAATATGATTATAAGGAAATCAAATAAATGTTGCCTTAACTTC |

Table D11B2.
Protein sequence of variant NOV4a2p (underlined). (SEQ ID NO:158)

| | |
|---|---|
| 1 | MRLLRGVFVVAAKRTPFGAYGGLLKDFTATDLSEFAAKAALSAGKVSPETVDSVIMGNVLQSSSDAIYLARHVGLRVGIP |
| 81 | KETPALTINRLCGSGFQSIVNGCQEICVKEAEVVLCGGTESMSQAPYCVRNVRFGTKLGSDIKLEDSLWVSLTDQHVQLP |
| 161 | MANTAENLTVKHKISREECDKYALQSQQRWKAANDAGYFNDEMAPIEVKTKKGKQTMQVDEHARPQTTLEQLQKLPPVFK |
| 241 | KDGTVTAGNASGVADGAGAVIIASEDAVKKHNFTPLARIVGYFVSGCDPSIMGIGPVPAISGALKKAGLSLKDMDLVEVN |
| 321 | EAFAPQYLAVERSLDLDISKTNVNGGAIALGHPLGGSGSRITAHLVHELRRRGGKYAVGSACIGGGQGIAVIIQSTA |

Table C11 B3. Alteration effect
None
Table D11C1.
Nucleotide sequence of variant 13380065 NOV4a3n (underlined). A/G
(SEQ ID NO:159)

| | |
|---|---|
| 1 | GCGTCCCCCACACCACAGACCCGCGCCGCCGACGACCCAGCAGCCGCCATGCGTCTGCTCCGAGGTGTGTTTGTAGTTGC |
| 81 | TGCTAAGCGAACGCCCTTTGGAGCTTACGGAGGCCTTCTGAAAGACTTCACTGCTACTGACTTGTCTGAATTTGCTGCCA |
| 161 | AGGCTGCCTTGTCTGCTGGCAAAGTCTCACCTGAAACAGTTGACAGTGTGATTATGGGCAATGTCCTGCAGAGTTCTTCA |
| 241 | GATGCTATATATTTGGCAAGGCATGTTGGTTTGCGTGTGGGAATCCCAAAGGAGACCCCAGCTCTCACGATTAATAGGCT |
| 321 | CTGTGCTTCTGGTTTTCAGTCCATTGTGAATGGATGTCAGGAAATTTCTGTTAAAGAAGCTGAAGTTGTTTTATGTGGAG |
| 401 | GAACCGAAAGCATGAGCCAAGCTCCCTACTGTGTCAGAAATGTGCGTTTTGGAACCAAGCTTGCATCAGATATCAAGCTG |
| 481 | GAAGATTCTTTATGGGTATCATTAACAGATCAGCATGTCCAGCTCCCCATGGCAATGACTGCAGAGAATCTTACTGTAAA |
| 561 | ACACAAAATAAGCAGAGAAGAATGTGACAAATATGCCCTGCAGTCACAGCAGAGATGGAAAGCTGCTAATGATGCTGGCT |
| 641 | ACTTTAATGATGAAATGGCACCAATTGAAGTGAAGACAAAGAAAGGAAAACAGACAATGCAGGTAGACGAGCATGCTCGG |
| 721 | CCCCAAACCACCCTGGAACAGTTACAGAAACTTCCTCCAGTATTCAAGAAAGATGGAACTGTTACTGCAGGGAATGCATC |
| 801 | GGGTGTAGCTGATGGTGCTGGAGCTGTTATCATAGCTAGTGAAGATGCTGTTAAGAAACATAACTTCACACCACTGGCAA |
| 881 | GAATTGTGGGCTACTTTGTATCTGGATGTGATCCCTCTATCATGGGTATTGGTCCTGTCCCTGCTATCAGTGGGGCACTG |
| 961 | AAGAAAGCAGGACTGAGTCTTAAGGACATGGATTTGGTAGAGGTGAATGAAGCTTTTGCTCCCCAGTACTTGGCTGTTGA |
| 1041 | GAGGAGTTTGGATCTTGACATAAGTAAAACCAATGTGAATGGAGGAGCCATTGCTTTGGGTCACCCACTGGGAGGATCTG |
| 1121 | GATCAAGAATTACTGCACACCTGGTTCACGAATTAAGGCGTCGAGGTGGAAAATATGCCGTTGGATCAGCTTGCATTGGA |
| 1201 | GGTGGCCAAGGTATTGCTGTCATCATTCAGAGCACAGCCTGAAGAGACCAGTGAGCTCACTGTGACCCATCCTTACTCTA |
| 1281 | CTTGGCCAGGCCACAGTAAAACAAGTGACCTTCAGAGCAGCTGCCACAACTGGCCATGCCCTGCCATTGAAACAGTGATT |
| 1361 | AAGTTTGATCAAGCCATGGTGACACAAAAATGCATTGATCATGAATAGGAGCCCATGCTAGAAGTACATTCTCTCAGATT |
| 1441 | TGAACCAGTGGAATATGATGTATTTCTGAGCTAAAACTCAACTATAGAAGACATTAAAAGAAATCGTATTCTTGCCAAGT |
| 1521 | AACCACCACTTCTGCCTTAGATAATATGATTATAAGGAAATCAAATAAATGTTGCCTTAACTTC |

Table D11C2.
Protein sequence of variant NOV4a3p (underlined). (SEQ ID NO:160)

| | |
|---|---|
| 1 | MRLLRGVFVVAAKRTPFGAYGGLLKDFTATDLSEFAAKAALSAGKVSPETVDSVIMGNVLQSSSDAIYLARHVGLRVGIP |
| 81 | KETPALTINRLCGSGFQSIVNGCQEICVKEAEVVLCGGTESMSQAPYCVRNVRFGTKLGSDIKLEDSLWVSLTDQHVQLP |
| 161 | MANTAENLTVKHKISREECDKYALQSQQRWKAANDAGYFNDEMAPIEVKTKKGKQTMQVDEHARPQTTLEQLQKLPPVFK |
| 241 | KDGTVTAGNASGVADGAGAVIIASEDAVKKHNFTPLARIVGYFVSGCDPSIMGIGPVPAISGALKKAGLSLKDMDLVEVN |
| 321 | EAFAPQYLAVERSLDLDISKTNVWGGAIALGHPLGGSGSRITAHLVHELRRRGGKYAVGSACIGGGQGIAVIIQSTA |

Table D11C3. Alteration effect
None
Table D11D1.
Nucleotide sequence of variant 13380066 NOV4a4n (underlined). C/T
(SEQ ID NO:161)

| | |
|---|---|
| 1 | GCGTCCCCCACACCACAGACCCGCGCCGCCGACGACCCAGCAGCCGCCATGCGTCTGCTCCGAGGTGTGTTTGTAGTTGC |
| 81 | TGCTAAGCGAACGCCCTTTGGAGCTTACGGAGGCCTTCTGAAAGACTTCACTGCTACTGACTTGTCTGAATTTGCTGCCA |
| 161 | AGGCTGCCTTGTCTGCTGGCAAAGTCTCACCTGAAACAGTTGACAGTGTGATTATGGGCAATGTCCTGCAGAGTTCTTCA |
| 241 | GATGCTATATATTTGGCAAGGCATGTTGGTTTGCGTGTGGGAATCCCAAAGGAGACCCCAGCTCTCACGATTAATAGGCT |
| 321 | CTGTGGTTCTGGTTTTCAGTCCATTGTGAATGGATGTCAGGAAATTTGTGTTAAAGAAGCTGAAGTTGTTTTATGTGGAG |
| 401 | GAACCGAAAGCATGAGCCAAGCTCCCTACTGTGTCAGAAATGTGCGTTTTGGAACCAAGCTTGGATCAGATATCAAGCTG |
| 481 | GAAGATTCTTTATGGGTATCATTAACAGATCAGCATGTCCAGCTCCCCATGGCAATGACTGCAGAGAATCTTACTGTAAA |
| 561 | ACACAAAATAAGCAGAGAAGAATGTGACAAATATGCCCTGCAGTCACAGCAGAGATGGAAAGCTGCTAATGATGCTGGCT |
| 641 | ACTTTAATGATGAAATGGCACCAATTGAAGTGAAGACAAAGAAAGGAAAACAGACAATGCAGGTAGACGAGCATGCTCGG |
| 721 | CCCCAAACCACCCTGGAACAGTTACAGAAACTTCCTCCAGTATTCAAGAAAGATGGAACTGTTACTGCAGGGAATGCATC |
| 801 | GGGTGTAGCTGATGGTGCTGGAGCTGTTATCATAGCTAGTGAAGATGCTGTTAAGAAACATAACTTCACACCACTGGCAA |
| 881 | GAATTGTGGGCTACTTTGTATCTGGATGTGATCCCTCTATCATGGGTATTGGTCCTGTCCCTGCTATCAGTGGGGCACTG |
| 961 | AAGAAAGCAGGACTGAGTCTTAAGGACATGGATTTGGTAGAGGTGAATGAAGCTTTTGCTCCCCAGTACTTGGCTGTTGA |
| 1041 | GAGGAGTTTGGATCTTGACATAAGTAAAACCAATGTGAATGGAGGAGCCATTGCTTTGGGTCACCCACTGGGAGGATCTG |
| 1121 | GATCAAGAATTACTGCACACCTGGTTCACGAATTAAGGCGTCGAGGTGGAAAATATGCCGTTGGATCAGCTTGCATTGGA |
| 1201 | GGTGGCCAAGGTATTGCTGTCATCATTCAGAGCACAGCCTGAAGAGACCAGTGAGCTCACTGTGACCCATCCTTACTCTA |
| 1281 | CTTGGCCAGGCCACAGTAAAACAAGTGACCTTCAGAGCAGCTGCCACAACTGGCCATGCCCTGCCATTGAAACAGTGATT |
| 1361 | AAGTTTGATCAAGCCATGGTGACACAAAAATGCATTGATCATGAATAGGAGCCCATGCTAGAAGTACATTCTCTCAGATT |
| 1441 | TGAACCAGTGAAATATGATGTATTTTTGAGCTAAAACTCAACTATAGAAGACATTAAAAGAAATCGTATTCTTGCCAAGT |
| 1521 | AACCACCACTTCTGCCTTAGATAATATGATTATAAGGAAATCAAATAAATGTTGCCTTAACTTC |

Table D11D2.
Protein sequence of variant NOV4a4p (underlined). (SEQ ID NO:162)

| | |
|---|---|
| 1 | MRLLRGVFVVAAKRTPFGAYGGLLKDFTATDLSEFAAKAALSAGKVSPETVDSVIMGNVLQSSSDAIYLARHVGLRVGIP |
| 81 | KETPALTINRLCGSGFQSIVNGCQEICVKEAEVVLCGGTESMSQAPYCVRNVRFGTKLGSDIKLEDSLWVSLTDQHVQLP |
| 161 | MANTAENLTVKHKISREECDKYALQSQQRWKAANDAGYFNDEMAPIEVKTKKGKQTMQVDEHARPOTTLEQLQKLPPVFK |
| 241 | KDGTVTAGNASGVADGAGAVIIASEDAVKKHNFTPLARIVGYFVSGCDPSIMGIGPVPAISGALKKAGLSLKDMDLVEVN |
| 321 | EAFAPQYLAVERSLDLDISKTNVNGGAIALGHPLGGSGSRITAHLVHELRRRGGKYAVGSACIGGGOGIAVIIQSTA |

Table D11D3. Alteration effect
None
Table D11E1.
Nucleotide sequence of variant 13380067 NOV4a5n (underlined). A/C
(SEQ ID NO:163)

| | |
|---|---|
| 1 | GCGTCCCCCACACCACAGACCCGCGCCGCCGACGACCCAGCAGCCGCCATGCGTCTGCTCCGAGGTGTGTTTGTAGTTGC |
| 81 | TGCTAAGCGAACGCCCTTTGGAGCTTACGGAGGCCTTCTGAAAGACTTCACTGCTACTGACTTGTCTGAATTTGCTGCCA |
| 161 | AGGCTGCCTTGTCTGCTGGCAAAGTCTCACCTGAAACAGTTGACAGTGTGATTATGGGCAATGTCCTGCAGAGTTCTTCA |
| 241 | GATGCTATATATTTGGCAAGGCATGTTGGTTTGCGTGTGGGAATCCCAAAGGAGACCCCAGCTCTCACGATTAATAGGCT |
| 321 | CTGTGGTTCTGGTTTTCAGTCCATTGTGAATGGATGTCAGGAAATTTGTGTTAAAGAAGCTGAAGTTGTTTTATGTGGAG |
| 401 | GAACCGAAAGCATGAGCCAAGCTCCCTACTGTGTCAGAAATGTGCGTTTTGGAACCAAGCTTGGATCAGATATCAAGCTG |
| 481 | GAAGATTCTTTATGGGTATCATTAACAGATCAGCATGTCCAGCTCCCCATGGCAATGACTGCAGAGAATCTTACTGTAAA |
| 561 | ACACAAAATAAGCAGAGAAGAATGTGACAAATATGCCCTGCAGTCACAGCAGAGATGGAAAGCTGCTAATGATGCTGGCT |
| 641 | ACTTTAATGATGAAATGGCACCAATTGAAGTGAAGACAAAGAAAGGAAAACAGACAATGCAGGTAGACGAGCATGCTCGG |
| 721 | CCCCAAACCACCCTGGAACAGTTACAGAAACTTCCTCCAGTATTCAAGAAAGATGGAACTGTTACTGCAGGGAATGCATC |
| 801 | GGGTGTAGCTGATGGTGCTGGAGCTGTTATCATAGCTAGTGAAGATGCTGTTAAGAAACATAACTTCACACCACTGGCAA |
| 881 | GAATTGTGGGCTACTTTGTATCTGGATGTGATCCCTCTATCATGGGTATTGGTCCTGTCCCTGCTATCAGTGGGGCACTG |
| 961 | AAGAAAGCAGGACTGAGTCTTAAGGACATGGATTTGGTAGAGGTGAATGAAGCTTTTGCTCCCCAGTACTTGGCTGTTGA |
| 1041 | GAGGAGTTTGGATCTTGACATAAGTAAAACCAATGTGAATGGAGGAGCCATTGCTTTGGGTCACCCACTGGGAGGATCTG |
| 1121 | GATCAAGAATTACTGCACACCTGGTTCACGAATTAAGGCGTCGAGGTGGAAAATATGCCGTTGGATCAGCTTGCATTGGA |
| 1201 | GGTGGCCAAGGTATTGCTGTCATCATTCAGAGCACAGCCTGAAGAGACCAGTGAGCTCACTGTGACCCATCCTTACTCTA |
| 1281 | CTTGGCCAGGCCACAGTAAAACAAGTGACCTTCAGAGCAGCTGCCACAACTGGCCATGCCCTGCCATTGAAACAGTGATT |
| 1361 | AAGTTTGATCAAGCCATGGTGACACAAAAATGCATTGATCATGAATAGGAGCCCATGCTAGAAGTACATTCTCTCAGATT |
| 1441 | TGAACCAGTGAAATATGATGTATTTCTGAGCTAAAACTCAACTATAGAAGACATTAAAAGAAATCGTATTCTTGCCAAGT |
| 1521 | AACCCCCACTTCTGCCTTAGATAATATGATTATAAGGAAATCAAATAAATGTTGCCTTAACTTC |

Table D11E2.
Protein sequence of variant NOV4a5p (underlined). (SEQ ID NO:164)

| | |
|---|---|
| 1 | MRLLRGVFVVAAKRTPFGAYGGLLKDFTATDLSEFAAKAALSAGKVSPETVDSVIMGNVLQSSSDAIYLARHVGLRVGIP |
| 81 | KETPALTINRLCGSGFQSIVNGCQEICVKEAEVVLCGGTESMSQAPYCVRNVRFGTKLGSDIKLEDSLWVSLTDQHVQLP |
| 161 | MAMTAENLTVKHKISREECDKYALQSQQRWKAANDAGYFNDEMAPIEVKTKKGKQTMQVDEHARPQTTLEQLQKLPPVFK |
| 241 | KDGTVTAGNASGVADGAGAVIIASEDAVKKHNFTPLARIVGYFVSGCDPSIMGIGPVPAISGALKKAGLSLKDMDLVEVN |
| 321 | EAFAPQYLAVERSLDLDISKTNVNGGAIALGHPLGGSGSRITAHLVHELRRRGGKYAVGSACIGGGQGIAVIIQSTA |

Table D11E3. Alteration effect
None
Table D11F1.
Nucleotide sequence of variant 13380068 NOV4a6n (underlined). T/C
(SEQ ID NO:165)

| | |
|---|---|
| 1 | GCGTCCCCCACACCACAGACCCGCGCCGCCGACGACCCAGCAGCCGCCATGCGTCTGCTCCGAGGTGTGTTTGTAGTTGC |
| 81 | TGCTAAGCGAACGCCCTTTGGAGCTTACGGAGGCCTTCTGAAAGACTTCACTGCTACTGACTTGTCTGAATTTGCTGCCA |
| 161 | AGGCTGCCTTGTCTGCTGGCAAAGTCTCACCTGAAACAGTTGACAGTGTGATTATGGGCAATGTCCTGCAGAGTTCTTCA |
| 241 | GATGCTATATATTTGGCAAGGCATGTTGGTTTGCGTGTGGGAATCCCAAAGGAGACCCCAGCTCTCACGATTAATAGGCT |
| 321 | CTGTGGTTCTGGTTTTCAGTCCATTGTGAATGGATGTCAGGAAATTTGTGTTAAAGAAGCTGAAGTTGTTTTATGTGGAG |
| 401 | GAACCGAAAGCATGAGCCAAGCTCCCTACTGTGTCAGAAATGTGCGTTTTGGAACCAAGCTTGGATCAGATATCAAGCTG |
| 481 | GAAGATTCTTTATGGGTATCATTAACAGATCAGCATGTCCAGCTCCCCATGGCAATGACTGCAGAGAATCTTACTGTAAA |
| 561 | ACACAAAATAACCAGAGAAGAATGTGACAAATATGCCCTGCAGTCACAGCAGAGATGGAAAGCTGCTAATGATGCTGGCT |
| 641 | ACTTTAATGATGAAATGGCACCAATTGAAGTGAAGACAAAGAAAGGAAAACAGACAATGCAGGTAGACGAGCATGCTCGG |
| 721 | CCCCAAACCACCCTGGAACAGTTACAGAAACTTCCTCCAGTATTCAAGAAAGATGGAACTGTTACTGCAGGGAATGCATC |
| 801 | GGGTGTAGCTGATGGTGCTGGAGCTGTTATCATAGCTAGTGAAGATGCTGTTAAGAAACATAACTTCACACCACTGGCAA |
| 881 | GAATTGTGGGCTACTTTGTATCTGGATGTGATCCCTCTATCATGGGTATTGGTCCTGTCCCTGCTATCAGTGGGGCACTG |
| 961 | AAGAAAGCAGGACTGAGTCTTAAGGACATGGATTTGGTAGAGGTGAATGAAGCTTTTGCTCCCCAGTACTTGGCTGTTGA |
| 1041 | GAGGAGTTTGGATCTTGACATAAGTAAAACCAATGTGAATGGAGGAGCCATTGCTTTGGGTCACCCACTGGGAGGATCTG |
| 1121 | GATCAAGAATTACTGCACACCTGGTTCACGAATTAAGGCGTCGAGGTGGAAAATATGCCGTTGGATCAGCTTGCATTGGA |
| 1201 | GGTGGCCAAGGTATTGCTGTCATCATTCAGAGCACAGCCTGAAGAGACCAGTGAGCTCACTGTGACCCATCCTTACTCTA |
| 1281 | CTTGGCCAGGCCACAGTAAAACAAGTGACCTTCAGAGCAGCTGCCACAACTGGCCATGCCCTGCCATTGAAACAGTGATT |
| 1361 | AAGTTTGATCAAGCCATGGTGACACAAAAATGCATTGATCATGAATAGGAGCCCATGCTAGAAGTACATTCTCTCAGATT |
| 1441 | TGAACCAGTGAAATATGATGTATTTCTGAGCTAAAACTCAACTATAGAAGACATTAAAAGAAATCGTATTCTTGCCAAGT |
| 1521 | AACCACCACTTCTGCCTTAGATAATATGACTATAAGGAAATCAAATAAATGTTGCCTTAACTTC |

Table D11F2.
Protein sequence of variant NOV4a6p (underlined). (SEQ ID NO:166)

| | |
|---|---|
| 1 | MRLLRGVFVVAAKRTPFGAYGGLLKDFTATDLSEFAAKAALSAGKVSPETVDSVIMGNVLOSSSDAIYLARHVGLRVGIP |
| 81 | KETPALTINRLCGSGFQSIVNGCQEICVKEAEVVLCGGTESMSQAPYCVRNVRFGTKLGSDIKLEDSLWVSLTDQHVQLP |
| 161 | MANTAENLTVKHKISREECDKYALQSQQRWKAANDAGYFNDEMAPIEVKTKKGKQTMQVDEHARPQTTLEQLQKLPPVFK |
| 241 | KDGTVTAGNASGVADGAGAVIIASEDAVKKHNFTPLARIVGYFVSGCDPSIMGIGPVPAISGALKKAGLSLKDMDLVEVN |
| 321 | SAFAPQYLAVERSLDLDISKTNVNGGAIALGHPLGGSGSRITAHLVHELRRRGGKYAVGSACIGGGQGIAVIIQSTA |

Table D11F3. Alteration effect
None

### EXAMPLE D6

### Expression Profile of the Human Acetyl-Coenzyme A acyltransferase 2 Gene

[0501] The protocol for quantitative expression analysis is disclosed in Example Q9.

[0502] Expression of gene CG181387-01 and CG181387-02 was assessed using the primer-probe set Ag6643, described in Table D13. Results of the RTQ-PCR runs are shown in Tables D14 and D15.

TABLE D13
Probe Name Ag6643

| | | | Start | SEQ ID |
|---|---|---|---|---|
| Primers | Sequences | Length | Position | No |
| Forward | 5′-tactgtaaaacacaaaataagcagagaag-3′ | 29 | 552 | 194 |
| Probe | TET-5′-aatatgccctgcagtcacagcagaga-3′- | 26 | 590 | 195 |
| | TAMRA | | | |
| Reverse | 5′-atcattaaagtagccagcatcattag-3′ | 26 | 626 | 196 |

[0503] TABLE D14
General screening panel v1.6

| | Rel. Exp. (%) |
|---|---|
| | Ag6643, Run |
| Tissue Name | 277256952 |
| Adipose | 12.8 |
| Melanoma* Hs688(A).T | 19.5 |
| Melanoma* Hs688(B).T | 18.4 |
| Melanoma* M14 | 11.5 |
| Melanoma* LOXIMVI | 11.3 |
| Melanoma* SK-MEL-5 | 17.1 |
| Squamous cell carcinoma SCC-4 | 0.5 |
| Testis Pool | 6.0 |
| Prostate ca.* (bone met) PC-3 | 4.3 |
| Prostate Pool | 4.0 |
| Placenta | 3.0 |
| Uterus Pool | 1.6 |
| Ovarian ca. OVCAR-3 | 6.6 |
| Ovarian ca. SK-OV-3 | 0.4 |
| Ovarian ca. OVCAR-4 | 4.0 |
| Ovarian ca. OVCAR-5 | 13.6 |
| Ovarian ca. IGROV-1 | 6.3 |
| Ovarian ca. OVCAR-8 | 1.4 |
| Ovary | 5.3 |
| Breast ca. MCF-7 | 7.7 |
| Breast ca. MDA-MB-231 | 13.1 |
| Breast ca. BT 549 | 28.3 |
| Breast ca. T47D | 4.9 |
| Breast ca. MDA-N | 8.8 |
| Breast Pool | 5.4 |
| Trachea | 1.7 |
| Lung | 1.7 |
| Fetal Lung | 9.3 |
| Lung ca. NCI-N417 | 6.2 |
| Lung ca. LX-1 | 19.8 |
| Lung ca. NCI-H146 | 31.9 |
| Lung ca. SHP-77 | 35.6 |
| Lung ca. A549 | 21.8 |
| Lung ca. NCI-H526 | 9.0 |
| Lung ca. NCI-H23 | 12.9 |
| Lung ca. NCI-H460 | 10.0 |
| Lung ca. HOP-62 | 3.8 |
| Lung ca. NCI-H522 | 24.5 |
| Liver | 18.6 |
| Fetal Liver | 27.9 |
| Liver ca. HepG2 | 9.3 |
| Kidney Pool | 6.9 |
| Fetal Kidney | 23.3 |
| Renal ca. 786-0 | 7.7 |
| Renal ca. A498 | 1.1 |
| Renal ca. ACHN | 4.2 |
| Renal ca. UO-31 | 16.6 |
| Renal ca. TK-10 | 7.2 |
| Bladder | 25.3 |
| Gastric ca. (liver met.) NCI-N87 | 13.6 |
| Gastric ca. KATO III | 100.0 |
| Colon ca. SW-948 | 9.5 |
| Colon ca. SW480 | 22.4 |
| Colon ca.* (SW480 met) SW620 | 14.9 |
| Colon ca. HT29 | 13.9 |
| Colon ca. HCT-116 | 5.4 |
| Colon ca. CaCo-2 | 45.1 |
| Colon cancer tissue | 13.3 |
| Colon ca. SW1116 | 2.7 |
| Colon ca. Colo-205 | 5.6 |
| Colon ca. SW-48 | 15.0 |
| Colon Pool | 5.1 |
| Small Intestine Pool | 3.5 |
| Stomach Pool | 2.6 |
| Bone Marrow Pool | 2.6 |
| Fetal Heart | 12.7 |
| Heart Pool | 11.0 |
| Lymph Node Pool | 5.6 |
| Fetal Skeletal Muscle | 7.2 |
| Skeletal Muscle Pool | 5.0 |
| Spleen Pool | 2.5 |
| Thymus Pool | 3.9 |
| CNS cancer (glio/astro) U87-MG | 7.8 |
| CNS cancer (glio/astro) U-118-MG | 21.3 |
| CNS cancer (neuro; met) SK-N-AS | 22.1 |
| CNS cancer (astro) SF-539 | 9.3 |
| CNS cancer (astro) SNB-75 | 32.5 |
| CNS cancer (glio) SNB-19 | 5.8 |
| CNS cancer (glio) SF-295 | 9.2 |
| Brain (Amygdala) Pool | 4.1 |
| Brain (cerebellum) | 4.8 |
| Brain (fetal) | 3.9 |
| Brain (Hippocampus) Pool | 5.7 |
| Cerebral Cortex Pool | 4.5 |
| Brain (Substantia nigra) Pool | 3.4 |
| Brain (Thalamus) Pool | 6.2 |
| Brain (whole) | 6.1 |
| Spinal Cord Pool | 5.6 |
| Adrenal Gland | 11.9 |
| Pituitary gland Pool | 2.1 |
| Salivary Gland | 1.0 |
| Thyroid (female) | 6.6 |
| Pancreatic ca. CAPAN2 | 10.9 |
| Pancreas Pool | 6.3 |

[0504] TABLE D15
Panel 5 Islet

| | Rel. Exp. (%) |
|---|---|
| | Ag6643, Run |
| Tissue Name | 279519414 |
| 97457_Patient-02go_adipose | 22.5 |
| 97476_Patient-07sk_skeletal muscle | 0.0 |
| 97477_Patient-07ut_uterus | 6.0 |
| 97478_Patient-07pl_placenta | 9.8 |
| 99167_Bayer Patient 1 | 20.9 |
| 97482_Patient-08ut_uterus | 3.5 |
| 97483_Patient-08pl_placenta | 6.6 |
| 97486_Patient-09sk_skeletal muscle | 9.4 |
| 97487_Patient-09ut_uterus | 6.7 |
| 97488_Patient-09pl_placenta | 4.5 |
| 97492_Patient-10ut_uterus | 12.5 |
| 97493_Patient-10pl_placenta | 19.9 |
| 97495_Patient-11go_adipose | 9.6 |
| 97496_Patient-11sk_skeletal muscle | 15.4 |
| 97497_Patient-11ut_uterus | 12.3 |
| 97498_Patient-11pl_placenta | 3.1 |
| 97500_Patient-12go_adipose | 29.9 |
| 97501_Patient-12sk_skeletal muscle | 51.4 |
| 97502_Patient-12ut_uterus | 13.6 |
| 97503_Patient-12pl_placenta | 10.4 |
| 94721_Donor 2 U - A_Mesenchymal Stem Cells | 37.1 |
| 94722_Donor 2 U - B_Mesenchymal Stem Cells | 24.5 |
| 94723_Donor 2 U - C_Mesenchymal Stem Cells | 36.1 |
| 94709_Donor 2 AM - A_adipose | 45.1 |
| 94710_Donor 2 AM - B_adipose | 25.7 |
| 94711_Donor 2 AM - C_adipose | 21.3 |
| 94712_Donor 2 AD - A_adipose | 49.7 |
| 94713_Donor 2 AD - B_adipose | 70.7 |
| 94714_Donor 2 AD - C_adipose | 60.7 |
| 94742_Donor 3 U - A_Mesenchymal Stem Cells | 12.2 |
| 94743_Donor 3 U - B_Mesenchymal Stem Cells | 12.7 |
| 94730_Donor 3 AM - A_adipose | 65.5 |
| 94731_Donor 3 AM - B_adipose | 68.3 |
| 94732_Donor 3 AM - C_adipose | 74.2 |
| 94733_Donor 3 AD - A_adipose | 100.0 |
| 94734_Donor 3 AD - B_adipose | 90.8 |
| 94735_Donor 3 AD - C_adipose | 29.3 |
| 77138_Liver_HepG2untreated | 59.5 |
| 73556_Heart_Cardiac stromal cells (primary) | 5.6 |
| 81735_Small Intestine | 32.8 |
| 72409_Kidney_Proximal Convoluted Tubule | 40.3 |
| 82685_Small intestine_Duodenum | 50.3 |
| 90650_Adrenal_Adrenocortical adenoma | 6.0 |
| 72410_Kidney_HRCE | 15.4 |
| 72411_Kidney_HRE | 16.0 |
| 73139_Uterus_Uterine smooth muscle cells | 5.1 |

[0505] General screening panel v1.6 Summary: Ag6643 Highest expression of this gene was detected in a gastric cancer KATO III cell line (CT=24.2). Moderate to high levels of expression of this gene were also seen in cluster of cancer cell lines derived from pancreatic, gastric, colon, lung, liver, renal, breast, ovarian, prostate, melanoma and brain cancers. Thus, expression of this gene could be used as a marker to detect the presence of these cancers. Therapeutic modulation of this gene, expressed protein and/or use of antibodies or small molecule drugs targeting the gene or gene product may be useful in the treatment of pancreatic, gastric, colon, lung, liver, renal, breast, ovarian, prostate, squamous cell carcinoma, melanoma and brain cancers.

[0506] Among tissues with metabolic or endocrine function, this gene was expressed at moderate to high levels in pancreas, adipose, adrenal gland, thyroid, pituitary gland, skeletal muscle, heart, liver and the gastrointestinal tract. Therapeutic modulation of this gene, expressed protein and/or use of antibodies or small molecule drugs targeting the gene or gene product may be useful in the treatment of endocrine/metabolically related diseases, such as obesity and diabetes.

[0507] In addition, this gene was expressed at moderate levels in all regions of the central nervous system examined, including amygdala, hippocampus, substantia nigra, thalamus, cerebellum, cerebral cortex, and spinal cord. Therapeutic modulation of this gene, expressed protein and/or use of antibodies or small molecule drugs targeting the gene or gene product may be useful in the treatment of central nervous system disorders such as Alzheimer's disease, Parkinson's disease, epilepsy, multiple sclerosis, schizophrenia and depression.

[0508] Panel 5 Islet Summary: Ag6643 Highest expression of this gene was detected in differentiated adipose (CT=28.2). High expression of this gene was seen in midway and fully differentiated adipose tissue, in addition moderate levels of expression of this gene was also detected in islet cells, skeletal muscle, small intestine and heart.

### EXAMPLE D7

### Assays for Modulators of Acetyl-Coenzyme A Acyltransferase 2

[0509] One potential assay that may be used to screen for modulators of Acetyl-Coenzyme A acyltransferase 2 is to measure acetoacetyl-CoA cleavage by an optical assay following the decrease of the enol and chelate form of acetoacetyl-CoA by absorption measurement at 305 nm as described Berndt H, Schlegel H G. Kinetics and properties of beta-ketothiolase from Clostridium pasteurianum. Arch Microbiol. 1975 Mar. 12; 103 (1):21-30, PMID: 240336).

[0510] Another potential assay that may be used to screen for modulators of Acetyl-Coenzyme A acyltransferase 2 is the measurement of NAD+/NADH production in a reaction coupled with the conversion reaction of 3-hydroxyacyl CoA to 3-oxoacyl CoA by the next mitochondrial enzyme (Barycki J J, O'Brien L K, Bratt J M, Zhang R, Sanishvili R, Strauss A W, Banaszak L J. Biochemical characterization and crystal structure determination of human heart short chain L-3-hydroxyacyl-CoA dehydrogenase provide insights into catalytic mechanism. Biochemistry. 1999 May 4; 38 (18):5786-98. PMID: 10231530).

[0511] Our results indicate that a modulator of ACAA2 activity, such as an inhibitor, activator, antagonist, or agonist of ACAA2 may be useful for treatment of such disorders as obesity, diabetes, and insulin resistance, as well as for enhancement of insulin secretion.

E. NOV5—PHOSPHOGLYCERATE MUTASE 2

[0512] Phosphoglycerate mutase is a dimeric enzyme containing, in different tissues, various proportions of a slow-migrating (PGM2) isoenzyme and a fast-migrating brain (PGM1) isoenzyme, which are encoded by different genes. PGM1 is a ubiquitously expressed isoenzyme with highest expression in the brain. In contrast, PGM2 is expressed specifically in skeletal muscle. Phosphoglycerate mutase is an enzyme involved in the second step of glycolysis (conversion of glyceraldehydes 3-phopshate to pyruvate). Complete deficiency in PGM2 leads to a muscle phenotype associated with mild myopathy and exercise intolerance (Tsujino S, Shanske S, Sakoda S, Fenichel G, DiMauro S. The molecular genetic basis of muscle phosphoglycerate mutase (PGAM) deficiency. (1993) Am. J. Hum. Genet. 52 (3):472-7 PMID: 8447317). This phenotype may promote energy expenditure in a diabetic/obese condition.

[0513] We have found that most of the enzymes involved in the second step of glycolysis are up-regulated in diabetic skeletal muscle. This is consistent with the literature data which demonstrated an increase in glycolytic enzyme activity and a decrease in oxidative enzyme activity in the skeletal muscle from diabetic/obese patients (Simoneau J A, Kelley D E. Altered glycolytic and oxidative capacities of skeletal muscle contribute to insulin resistance in NIDDM. (1997) J. Appl. Physiol. 83 (1):166-71 PMID: 9216960). Disbalance of glycolytic/oxidative capacity may increase the lipid content and consequentially lead to the development of insulin resistance in skeletal muscle.

[0514] Our differential expression (GeneCalling®) data shows the up-regulation of PGM1 in soleus muscle in diabetic compared to non-diabetic animals. PGM 1 was found expressed more in glycolytic then in oxidative muscle fiber. RTQ-PCR results demonstrate that PGM2 is specifically expressed in muscle tissue and up-regulated in insulin resistant skeletal muscle from patients with Gestational Diabetes. Up-regulation of both PGM1 and PGM2 detected in our studies would contribute to increase in glycolytic muscle capacity described in diabetic conditions.

[0515] FIG. 3 suggests how alterations in expression of the human Phosphoglycerate mutase 2 and associated gene products function in the etiology and pathogenesis of obesity and/or diabetes. The scheme incorporates the unique findings of our studies in conjunction with what has been reported in the literature.

[0516] FIG. 4 summarizes the biochemistry surrounding the human Phosphoglycerate mutase 2 and potential assays that may be used to screen for antibody therapeutics or small molecule drugs to treat obesity and/or diabetes. In the presence of 2,3-biphosphoglycerate, phosphoglycerate mutase catalyses the interconversion between 3-phosphoglycerate and 2-phosphoglycerate, the third step in conversion of glyceraldehydes-3-phosphate to pyruvate:
3-Phosphoglycerate⇄2-phospoglycerate

[0517] Activation of glycolysis can contribute to disproportional increase in glycolytic capacity in diabetic skeletal muscle and development of insulin resistance. Because of specific expression of PGM2 in skeletal muscle, its inhibition may restore the energy balance and favor the oxidative muscle phenotype with minimal effect on glycolysis in other tissues. The outcome of inhibiting the action of the human Phosphoglycerate mutase 2 would be a reduction of Insulin Resistance, a major problem in obesity and/or diabetes. Thus, an antagonist or an inhibitor of PGM2 may be used for the treatment of obesity and/or diabetes.

[0518] Cell lines expressing the Phosphoglycerate mutase 2 are described in the RTQ-PCR results described herein. These and other Phosphoglycerate mutase 2 expressing cell lines could be used for screening purposes. The assay for measurement of phosphoglycerate mutase activity and the selective inhibitor for PGM2 have been described in literature (see for example White M F, Fothergill-Gilmore L A. Development of a mutagenesis, expression and purification system for yeast phosphoglycerate mutase. Investigation of the role of active-site His181. Eur J. Biochem. 1992 Jul. 15; 207 (2):709-14. PMID: 1386023, Rigden D J, Walter R A, Phillips S E, Fothergill-Gilmore L A. Polyanionic inhibitors of phosphoglycerate mutase: combined structural and biochemical analysis. J Mol. Biol. 1999 Jun. 18; 289 (4):691-9. PMID: 10369755).

[0519] Furthermore, our results indicate that a modulator of Phosphoglycerate mutase 2 activity, such as an inhibitor, activator, antagonist, or agonist of Phosphoglycerate mutase 2 may be useful for treatment of such disorders as obesity, diabetes, and insulin resistance, as well as for enhancement of insulin secretion.

Discovery Process

[0520] The disregulation of PGM1 isoform in diet induced obesity study suggests that the increase in phosphoglycerate mutase activity in skeletal muscle may contribute to the development of insulin resistance and diabetes. Based on expression data, we propose PGM2, major skeletal muscle isoform of phosphoglycerate mutase, CG186640-O₂— encoded protein and any variants, thereof, as being suitable as diagnostic markers, targets for an antibody therapeutic and targets for a small molecule drugs for Obesity and Diabetes. Dysregulation of PGM1 gene in GeneCalling® study described below is supportive for disease rationale for phosphoglycerate mutase isoform 2.

[0521] The following sections describe the study design(s) and the techniques used to identify the Phosphoglycerate mutase 2—encoded protein and any variants, thereof, as being suitable as diagnostic markers, targets for an antibody therapeutic and targets for a small molecule drugs for Obesity and Diabetes.

### EXAMPLE E1

### Mouse Dietary-Induced Obesity

[0522] A protocol for Mouse Dietary-Induced Obesity study is disclosed in Example Q1.

[0523] The predominant cause for obesity in clinical populations is excess caloric intake. This so-called diet-induced obesity (DIO) is mimicked in animal models (mouse strain C57BL/6J) by feeding high fat diets of greater than 40% fat content. The DIO study was established to identify the gene expression changes contributing to the development and progression of diet-induced obesity. In addition, the study design sought to identify the factors that lead to the ability of certain individuals to resist the effects of a high fat diet and thereby prevent obesity. The sample groups for the study had body weights +1 S.D., +4 S.D. and +7 S.D. of the chow-fed controls. In addition, the biochemical profile of the +7 S.D. mice revealed a further stratification of these animals into mice that retained a normal glycemic profile in spite of obesity and mice that demonstrated hyperglycemia. Tissues examined included hypothalamus, brainstem, liver, retroperitoneal white adipose tissue (WAT), epididymal WAT, brown adipose tissue (BAT), gastrocnemius muscle (fast twitch skeletal muscle) and soleus muscle (slow twitch skeletal muscle). The differential gene expression profiles for these tissues revealed genes and pathways that can be used as therapeutic targets for obesity. Protocol for differential gene expression analysis, GeneCalling®, is disclosed in Example Q7.

Results

[0524] A fragment of the mouse Phosphoglycerate mutase 1 gene was initially found to be up-regulated by 2.7 fold in the soleus muscle of hyperglycemic (hgsd7, diabetic) mice relative to euglycemic (sd1, normal control) mice using CuraGen's GeneCalling® method of differential gene expression (Table E1 shows the alignment of the PGM1 and PGM2 protein sequences with PGM1 protein sequence shown separately in Table E2). A differentially expressed mouse gene fragment migrating, at approximately 153 nucleotides in length was definitively identified as a component of the mouse Phosphoglycerate mutase 1 cDNA. The method of comparative PCR was used for conformation of the gene assessment. The electropherographic peaks corresponding to the gene fragment of the mouse Phosphoglycerate mutase 1 were ablated when a gene-specific primer (shown in Table E3) competes with primers in the linker-adaptors during the PCR amplification. The peaks at 153 nt in length were ablated in the sample from both the hyperglycemic and euglycemic mice. A gene fragment of the mouse Phosphoglycerate mutase 1 was also found to be upregulated by approximately 2 fold in the gastrocnemius (glycolytic) muscle relative to slow twitch (oxidative) muscle fiber of obese hyperglycemic mice. These data show that phosphoglycerate mutase may be involved in the development of diabetes/obesity and its modulation, such as inhibition, may be beneficial for the treatment of these diseases.

[image]

TABLE E2

Protein sequence of Phosphoglycerate mutase 1
(PGM1) (CG115294-02; SEQ ID NO:197)

(SEQ ID NO:197)

CG115294-02
AAYKLVLIRHGESAWNLENRFSGWYDADLSPAGHEEAKRGGQALRDAGYE
FDICFTSVQKRAIRTLWTVLDAIDQMWLPVVRTWRLNERHYGGLTGLNKA
ETAAKHGEAQVKIWRRSYDVPPPPMEPDHPFYSNISKDRRYADLTEDQLP
SCESLKDTIARALPFWNEEIVPQIKEGKRVLIAAHGNSLRGIVKHLEGLS
EEAIMELNLPTGIPIVYELDKNLKPIKPMQFLGDEETVRKAMEAV
AAQGKAKK

[0525] TABLE E3

The direct sequence of the 153 nucleotide-long gene fragment and the
gene-specific primers used for competitive PCR are indicated on the
cDNA sequence of the Phosphoglycerate mutase 1 fragment (SEQ ID
NO:198) are shown below in bold. The gene-specific primers at the 5′
and 3′ ends of the fragment are underlined.
Gene Sequence (fragment from 80 to 233 in bold, band size: 154)

```
    1 AGGCGACGCG GCGGCCAGGC GTTGCGAGAT GCTGGCTATG AATTTGACAT CTGCTTCACC
  61 TCTGTGCAGA AGAGAGCAAT CCGGACCCTC TGGACAGTCC TGGATGCCAT TGACCAGATG
121 TGGTTGCCAG TGGTCAGGAC TTGGCGCCTC AATGAGCGAC ACTATGGCGG TCTGACAGGT
181 CTCAACAAAG CAGAAACTQC TGCTAAGCAA TGGTGAGGCC CAGGTAAAGA TCTGGAAACG
241 ATCTTATGAT GTCCCACCGG CTCCCATTGG ACCCTGATTA ACCCTTTCTA CAGCAACATT
301 CAGCAAGGAA TCGCAGGTAC GCAGAACCTT ACTGAAAGAC CCGCTTCCCC TCCTGT
```

(gene length is 356, only region from 1 to 356 shown)

### EXAMPLE E2

### Identification of Human Sequence of Phosphoglycerate Mutase 2

[0526] The sequence of Human Phosphoglycerate mutase 2 (Acc. No. CG 186640-O₂) was derived by laboratory cloning of cDNA fragments, by in silico prediction of the sequence. cDNA fragments covering either the full length of the DNA sequence, or part of the sequence, or both, were cloned. In silico prediction was based on sequences available in CuraGen's proprietary sequence databases or in the public human sequence databases, and provided either the full-length DNA sequence, or some portion thereof.

[0527] Table E4 shows an alignment (ClustalW) of the protein sequences of the human (CG186640-O₂; SEQ ID NO:46), rat (M31835; SEQ ID NO:199) and mouse (AF029843; BC010750; SEQ ID NO:200) versions of the Phosphoglycerate mutase 2. Table E5 shows sequences of rat (M31835; SEQ ID NO:199) and mouse (AF029843; BC010750; SEQ ID NO:200) versions of the Phosphoglycerate mutase 2.

[image]

[image]

TABLE E5

sequences of rat (M31835; SEQ ID NO:199) and mouse (AF029843;
BC010750; SEQ ID NO:200) versions of the Phosphoglycerate mutase 2.

>PGM2_rat (M3 1835; SEQ ID NO:199)
MATHRLVMVRHGESSWNQENRFCGWFDAELSEKGAEEAKRGATAIKDAKIEFDICYTSVLKRAIR
TLWTILDVTDQMWVPVVRTWRLNERHYGGLTGLNKAETAAKHGEEQVKIWRRSFDTPPPPMDE
KHNYYASISKDRRYAGLKPEELPTCESLKDTIARALPFWNEEIAPKIKAGKRVLIAAHGNSLRGIVK
HLEGMSDQAIMELNLPTGIPIVYELNQELKPTKPMRFLGDEETVRKAMEAVAAQGKAK
>PGM2_mouse (AF029843; BC010750; SEQ ID NO:200)
MTTHRLVMVRHGESLWNQENRFCGWFDAELSEKGAEEAKRGATAIKDAKIEFDICYTSVLKRAIR
TLWTILDVTDQMWVPVVRTWRLNERHYGGLTGLNKAETAAKHGEEQVKIWRRSFDTPPPPMDE
KHNYYTSISKDRRYAGLKPEELPTCESLKDTIARALPFWNEEIAPKIKAGQRVLIAAHGNSLRGIVK
HLEGMSDQAIMELNLPTGIPIVYELDQNLKPTKPMRFLGDEETVRKAMEAVAAQGKAK

[0528] The laboratory cloning was performed using one or more of the methods summarized in Example Q8. The NOV5 clone was analyzed, and the nucleotide and encoded polypeptide sequences are shown in Table E6.

TABLE E6
NOV5 Sequence Analysis

| | | |
|---|---|---|
| NOV5a, CG186640-02 | SEQ ID NO:45 | 834 bp |
| DNA Sequence | ORF Start: ATG at 36 | ORF Stop: TGA at 795 |

CCCGTCCAGAGTCCTCTGTGGTCCCTGCTGCCACCATGGCCACTCACCGCCTCGTGATGGTCCGGCAC
GGCGAGACGACATGGAACCAGGAGAACCGTTTCTGTGGCTGGTTCGATGCAGAGCTGAGTGAAAAGGG
GACCGAGGAGGCCAAGCGGGGAGCCAAGGCCATCAAGGATGCCAAGATGGAGTTTGACATCTGCTACA
CGTCAGTGCTGAAGCGGGCCATCCGAACCCTCTGGGCCATCCTGGACGGCACGGACCAGATGTGGCTG
CCTGTGGTGCGCACTTGGCGCTTCAATGAGCGGCATTACGGGGGCCTCACAGGCTTCAACAAGGCAGA
AACGGCCGCCAAGCACGGGGAGGAGCAGGTAAGATCTTGGAGGCGCTCCTTCGACATCCCGCCGCCCC
CGATGGACGAGAAGCACCCCTACTACAACTCCATTAGCAAGGAGCGTCGGTACGCAGGCCTGAAGCCC
GGGGAACTCCCCACCTGCGAGAGCCTCAAGGACACCATTGCCCGGGCCCTGCCCTTCTGGAACGAGGA
GATTGTTCCCCAGATCAAGGCCGGCAAGCGAGTGCTCATTGCAGCCCACGGGAACAGCCTGCGGGGCA
TTGTCAAGCACCTGGAAGGGATGTCAGACCAGGCGATCATGGAGCTGAACCTGCCCACGGGGATCCCC
ATTGTGTATGAGCTGAACAAGGAGCTGAAGCCCACCAAGCCCATGCAGTTCCTGGGTGATGAGGAAAC
GGTGCGGAAGGCCATGGAGGCTGTGGCTGCCCAGGGCAAGGCCAAGTGAGGGGTGGGCTTTGGGCAAT
AAAGGCACCTCCCCCAAC

| | | | |
|---|---|---|---|
| NOV5a, CG186640-02 | | | |
| Protein Sequence | SEQ ID NO:46 | 253 aa | MW at 28849.9 kD |

MATHRLVMVRHGETTWNQENRFCGWFDAELSEKGTEEAKRGAKAIKDAKMEFDICYTSVLKRAIRTLW
AILDGTDQMWLPVVRTWRFNERHYGGLTGFNKAETAAKHGEEQVRSWRRSFDIPPPPMDEKHPYYNSI
SKERRYAGLKPGELPTCESLKDTIARALPFWNEEIVPQIKAGKRVLIAAHGNSLRGIVKHLEGMSDQA
IMELNLPTGIPIVYELNKELKPTKPMQFLGDEETVRKAMEAVAAQGKAK

| | | |
|---|---|---|
| NOV5b, 311980359 | SEQ ID NO:47 | 786 bp |
| DNA Sequence | ORF Start: at 1 | ORF Stop: TGA at 784 |

ACCATGGGACATCATCACCACCATCACGCCACTCACCGCCTCGTGATGGTCCGGCACGGCGAGAGCAC
ATGGAACCAGGAGAACCGTTTCTGTGGCTGGTTCGATGCAGAGCTGAGTGAAAAGGGGACCGAGGAGG
CCAAGCGGGGAGCCAAGGCCATCAAGGATGCCAAGATGGAGTTTGACATCTGCTACACGTCAGTGCTG
AAGCGGGCCATCCGCACCCTCTGGGCCATCCTGGACGGCACGGACCAGATGTGGCTGCCTGTGGTGCG
CACTTGGCGCCTCAATGAGCGGCATTACGGGGGCCTCACAGGCCTCAACAAGGCAGAAACGGCCGCCA
AGCACGGGGAGGAGCAGGTGAAGATCTGGAGGCGCTCCTTCGACATCCCGCCGCCCCCGATGGACGAG
AAGCACCCCTACTACAACTCCATTAGCAAGGAGCGTCGGTACGCAGGCCTGAAGCCCGGGGAACTCCC
CACCTGCGAGAGCCTCAAGGACACCATTGCCCGGGCCCTGCCCTTCTGGAACGAGGAGATTGTTCCCC
AGATCAAGGCCGGCAAGCGAGTGCTCATTGCAGCCCACGGGAACAGCCTGCGGGGCATTGTCAAGCAC
CTGGAAGGGATGTCAGACCAGGCGATCATGGAGCTGAACCTGCCCACGGGGATCCCCATTGTGTATGA
GCTGAACAAGGAGCTGAAGCCCACCAAGCCCATGCAGTTCCTGGGTGATGAGGAAACGGTGCGGAAGG
CCATGGAGGCTGTGGCTGCCCAGGGCAAGGCCAAGTGA

| | | | |
|---|---|---|---|
| NOV5b, 311980359 | | | |
| Protein Sequence | SEQ ID NO:48 | 261 aa | MW at 29746.9 kD |

TMGHHHHHHATHRLVMVRHGESTWNQENRFCGWFDAELSEKGTEEAKRGAKAIKDAKMEFDICYTSVL
KRAIRTLWAILDGTDQMWLPVVRTWRLNERHYGGLTGLNKAETAAKHGEEQVKIWRRSFDIPPPPMDE
KHPYYNSISKERRYAGLKPGELPTCESLKDTIARALPFWNEEIVPQIKAGKRVLIAAHGNSLRGIVKH
LEGMSDQAIMELNLPTGIPIVYELNKELKPTKPMQFLGDEETVRKAMEAVAAQGKAK

| | | |
|---|---|---|
| NOV5c, CG186640-01 | SEQ ID NO:49 | 898 bp |
| DNA Sequence | ORF Start: ATG at 67 | ORF Stop: TGA at 826 |

AATTCGGTACGAGGGTTGGGAAGCAGCCGTCCCCGTCCAGAGTCCTCTGTGGTCCCTGCTGCCACCAT
GGCCACTCACCGCCTCGTGATGGTCCGGCACGGCGAGAGCACATGGAACCAGGAGAACCGTTTCTGTG
GCTGGTTCGATGCAGAGCTGAGTGAAAAGGGGACCGAGGAGGCCAAGCGGGGAGCCAAGGCCATCAAG
GATGCCAAGATGGAGTTTGACATCTGCTACACGTCAGTGCTGAAGCGGGCCATCCGCACCCTCTGGGC
CATCCTGGACGGCACGGACCAGATGTGGCTGCCTGTGGTGCGCACTTGGCGCCTCAATGAGCGGCATT
ACGGGGGCCTCACAGGCCTCAACAAGGCAGAAACGGCCGCCAAGCACGGGGAGGAGCAGGTGAAGATC
TGGAGGCGCTCCTTCGACATCCCGCCGCCCCCGATGGACGAGAAGCACCCCTACTACAACTCCATTAG
CAAGGAGCGTCGGTACGCAGGCCTGAAGCCCGGGGAACTCCCCACCTGCGAGAGCCTCAAGGACACCA
TTGCCCGGGCCCTGCCCTTCTGGAACGAGGAGATTGTTCCCCAGATCAAGGCCGGCAAGCGAGTGCTC
ATTGCAGCCCACGGGAACAGCCTGCGGGGCATTGTCAAGCACCTGGAAGGGATGTCAGACCAGGCGAT
CATGGAGCTGAACCTGCCCACGGGGATCCCCATTGTGTATGAGCTGAACAAGGAGCTGAAGCCCACCA
AGCCCATGCAGTTCCTGGGTGATGAGGAAACGGTGCGGAAGGCCATGGAGGCTGTGGCTGCCCAGGGC
AAGGCCAAGTGAGGGGTGGGCTTGGGCAATAAAGGCACCTCCCCCAACAAAAAAAAAAAAAAAAAAAA
AAAAAAAAAAAAGC

| | | | |
|---|---|---|---|
| NOV5c, CG186640-01 | | | |
| Protein Sequence | SEQ ID NO:50 | 253 aa | MW at 28765.9 kD |

MATHRLVMVRHGESTWNQENRFCGWFDAELSEKGTEEAKRGAKAIKDAKMEFDICYTSVLKRAIRTLW
AILDGTDQMWLPVVRTWRLNERHYGGLTGLNKAETAAKHGEEQVKIWRRSFDIPPPPMDEKHPYYNSI
SKERRYAGLKPGELPTCESLKDTIARALPFWNEEIVPQIKAGKRVLIAAHGNSLRGIVKHLEGMSDQA
IMELNLPTGIPIVYELNKELKPTKPMQFLGDEETVRKAMEAVAAQGKAK

| | | |
|---|---|---|
| NOV5d, CG186640-03 | SEQ ID NO:51 | 763 bp |
| DNA Sequence | ORF Start: at 1 | ORF Stop: at 760 |

ACCATGGCCACTCACCGCCTCGTGATGGTCCGGCACGGCGAGAGCACATGGAACCAGGAGAACCGTTT
CTGTGGCTGGTTCGATGCAGAGCTGAGTGAAAAGGGGACCGAGGAGGCCAAGCGGGGAGCCAAGGCCA
TCAAGGATGCCAAGATGGAGTTTGACATCTGCTACACGTCAGTGCTGAAGCGGGCCATCCGCACCCTC
TGGGCCATCCTGGACGGCACGGACCAGATGTGGCTGCCTGTGGTGCGCACTTGGCGCCTCAATGAGCG
GCATTACGGGGGCCTCACAGGCCTCAACAAGGCAGAAACGGCCGCCAAGCACGGGGAGGAGCAGGTGA
AGATCTGGAGGCGCTCCTTCGACATCCCGCCGCCCCCGATGGACGAGAAGCACCCCTACTACAACTCC
ATTAGCAAGGAGCGTCGGTACGCAGGCCTGAAGCCCGGGGAACTCCCCACCTGCGAGAGCCTCAAGGA
CACCATTGCCCGGGCCCTGCCCTTCTGGAACGAGGAGATTGTTCCCCAGATCAAGGCCGGCAAGCGAG
TGCTCATTGCAGCCCACGGGAACAGCCTGCGGGGCATTGTCAAGCACCTGGAAGGGATGTCAGACCAG
GCGATCATGGAGCTGAACCTGCCCACGGGGATCCCCATTGTGTATGAGCTGAACAAGGAGCTGAAGCC
CACCAAGCCCATGCAGTTCCTGGGTGATGAGGAAACGGTGCGGAAGGCCATGGAGGCTGTGGCTGCCC
AGGGCAAGGCCAAGT

| | | | |
|---|---|---|---|
| NOV5d, CG186640-03 | | | |
| Protein Sequence | SEQ ID NO:52 | 253 aa | MW at 28738.8 kD |

TMATHRLVMVRHGESTWNQENRFCGWFDAELSEKGTEEAKRGAKAIKDAKMEFDICYTSVLKRAIRTL
WAILDGTDQMWLPVVRTWRLNERHYGGLTGLNKAETAAKHGEEQVKIWRRSFDIPPPPMDEKHPYYNS
ISKERRYAGLKPGELPTCESLKDTIARALPFWNEEIVPQIKAGKRVLIAAHGNSLRGIVKHLEGMSDQ
AIMELNLPTGIPIVYELNKELKPTKPMQFLGDEETVRKANEAVAAQGKA

| | | |
|---|---|---|
| NOV5e, CG186640-04 | SEQ ID NO:53 | 786 bp |
| DNA Sequence | ORF Start: at 1 | ORF Stop: TGA at 784 |

ACCATGGGACATCATCACCACCATCACGCCACTCACCGCCTCGTGATGGTCCGGCACGGCGAGAGCAC
ATGGAACCAGGAGAACCGTTTCTGTGGCTGGTTCGATGCAGAGCTGAGTGAAAAGGGGACCGAGGAGG
CCAAGCGGGGAGCCAAGGCCATCAAGGATGCCAAGATGGAGTTTGACATCTGCTACACGTCAGTGCTG
AAGCGGGCCATCCGCACCCTCTGGGCCATCCTGGACGGCACGGACCAGATGTGGCTGCCTGTGGTGCG
CACTTGGCGCCTCAATGAGCGGCATTACGGGGGCCTCACAGGCCTCAACAAGGCAGAAACGGCCGCCA
AGCACGGGGAGGAGCAGGTGAAGATCTGGAGGCGCTCCTTCGACATCCCGCCGCCCCCGATGGACGAG
AAGCACCCCTACTACAACTCCATTAGCAAGGAGCGTCGGTACGCAGGCCTGAAGCCCGGGGAACTCCC
CACCTGCGAGAGCCTCAAGGACACCATTGCCCGGGCCCTGCCCTTCTGGAACGAGGAGATTGTTCCCC
AGATCAAGGCCGGCAAGCGAGTGCTCATTGCAGCCCACGGGAACAGCCTGCGGGGCATTGTCAAGCAC
CTGGAAGGGATGTCAGACCAGGCGATCATGGAGCTGAACCTGCCCACGGGGATCCCCATTGTGTATGA
GCTGAACAAGGAGCTGAAGCCCACCAAGCCCATGCAGTTCCTGGGTGATGAGGAAACGGTGCGGAAGG
CCATGGAGGCTGTGGCTGCCCAGGGCAAGGCCAAGTGA

| | | | |
|---|---|---|---|
| NOV5e, CG186640-04 | | | |
| Protein Sequence | SEQ ID NO:54 | 261 aa | MW at 29746.9 kD |

TMGHHHHHHATHRLVMVRHGESTWNQENRFCGWFDAELSEKGTEEAKRGAKAIKDAKNEFDICYTSVL
KRAIRTLWAILDGTDQMWLPVVRTWRLNERHYGGLTGLNKAETAAKHGEEQVKIWRRSFDIPPPPMDE
KHPYYNSISKERRYAGLKPGELPTCESLKDTIARALPFWNEEIVPQIKAGKRVLIAAHGNSLRGIVKH
LEGMSDQAIMELNLPTGIPIVYELNKELKPTKPMQFLGDEETVRKAMEAVAAQGKAK

[0529] A ClustalW comparison of the above protein sequences yields the following sequence alignment shown in Table E7.

TABLE E7
Comparison of the NOV5 protein sequences.

| | |
|---|---|
| NOV5a | ————————MATHRLVMVRHGETTWNQENRFCGWFDAELSEKGTEEAKRGAKAIKDAKMEF |
| NOV5b | TMGHHHHHHATHRLVMVRHGESTWNQENRFCGWFDAELSEKGTEEAKRGAKAIKDAKMEF |
| NOV5c | ————————MATHRLVMVRHGESTWNQENRFCGWFDAELSEKGTEEAKRGAKAIKDAKMEF |
| NOV5d | ———————TMATHRLVMVRHGESTWNQENRFCGWFDAELSEKGTEEAKRGAKAIKDAKMEF |
| NOV5e | TMGHHHHHHATHRLVMVRHGESTWNQENRFCGWFDAELSEKGTEEAKRGAKAIKDAKMEF |
| NOV5a | DICYTSVLKRAIRTLWAILDGTDQMWLPVVRTWRFNERHYGGLTGFNKAETAAKHGEEQV |
| NOV5b | DICYTSVLKRAIRTLWAILDGTDQMWLPVVRTWRLNERHYGGLTGLNKAETAAKHGEEQV |
| NOV5c | DICYTSVLKRAIRTLWAILDGTDQMWLPVVRTWRLNERHYGGLTGLNKAETAAKHGEEQV |
| NOV5d | DICYTSVLKRAIRTLWAILDGTDQMWLPVVRTWRLNERHYGGLTGLNKAETAAKHGEEQV |
| NOV5e | DICYTSVLKRAIRTLWAILDGTDQMWLPVVRTWRLNERHYGGLTGLNKAETAAKHGEEQV |
| NOV5a | RSWRRSFDIPPPPMDEKHPYYNSISKERRYAGLKPGELPTCESLKDTIARALPFWNEEIV |
| NOV5b | KIWRRSFDIPPPPMDEKHPYYNSISKERRYAGLKPGELPTCESLKDTIARALPFWNEEIV |
| NOV5c | KIWRRSFDIPPPPMDEKHPYYNSISKERRYAGLKPGELPTCESLKDTIARALPFWNEEIV |
| NOV5d | KIWRRSFDIPPPPMDEKHPYYNSISKERRYAGLKPGELPTCESLKDTIARALPFWNEEIV |
| NOV5e | KIWRRSFDIPPPPMDEKHPYYNSISKERRYAGLKPGELPTCESLKDTIARALPFWNEEIV |
| NOV5a | PQIKAGKRVLIAAHGNSLRGIVKHLEGMSDQAIMELNLPTGIPIVYELNKELKPTKPMQF |
| NOV5b | PQIKAGKRVLIAAHGNSLRGIVKHLEGMSDQAIMELNLPTGIPIVYELNKELKPTKPMQF |
| NOV5c | PQIKAGKRVLIAAHGNSLRGIVKHLEGMSDQAIMELNLPTGIPIVYELNKELKPTKPMQF |
| NOV5d | PQIKAGKRVLIAAHGNSLRGIVKHLEGMSDQAIMELNLPTGIPIVYELNKELKPTKPMQF |
| NOV5e | PQIKAGKRVLIAAHGNSLRGIVKHLEGMSDQAIMELNLPTGIPIVYELNKELKPTKPMQF |
| NOV5a | LGDEETVRKAMEAVAAQGKAK |
| NOV5b | LGDEETVRKAMEAVAAQGKAK |
| NOV5c | LGDEETVRKAMEAVAAQGKAK |
| NOV5d | LGDEETVRKAMEAVAAQGKA— |
| NOV5e | LGDEETVRKAMEAVAAQGKAK |
| NOV5a | (SEQ ID NO:46) |
| NOV5b | (SEQ ID NO:48) |
| NOV5c | (SEQ ID NO:50) |
| NOV5d | (SEQ ID NO:52) |
| NOV5e | (SEQ ID NO:54) |

[0530] Further analysis of the NOV5a protein yielded the following properties shown in Table E8.

TABLE E8
Protein Sequence Properties NOV5a

| SignalP | No Known Signal Sequence Predicted | | | |
|---|---|---|---|---|
| analysis: | | | | |
| PSORT II | PSG: a new signal peptide prediction method | | | |
| analysis: | N-region: length 10; pos. chg 2; neg. chg 0 | | | |
| | H-region: length 2; peak value −7.76 | | | |
| | PSG score: −12.16 | | | |
| | GvH: von Heijne's method for signal seq. recognition | | | |
| | GvH score (threshold: −2.1): −12.65 | | | |
| | possible cleavage site: between 14 and 15 | | | |
| | >>> Seems to have no N-terminal signal peptide | | | |
| | ALOM: Klein et al's method for TM region allocation | | | |
| | Init position for calculation: 1 | | | |
| | Tentative number of TMS(s) for the threshold 0.5: 0 | | | |
| | number of TMS(s) . . . fixed | | | |
| | PERIPHERAL Likelihood = 5.41 (at 204) | | | |
| | ALOM score: 5.41 (number of TMSs: 0) | | | |
| | MITDISC: discrimination of mitochondrial targeting seq | | | |
| | R content: | 2 | Hyd Moment(75): | 10.06 |
| | Hyd Moment(95): | 6.20 | G content: | 1 |
| | D/E content: | 2 | S/T content: | 3 |

Score: −4.24
Gavel: prediction of cleavage sites for mitochondrial preseq
R-2 motif at 20 VRH|GE
NUCDISC: discrimination of nuclear localization signals
pat4: none
pat7: none
bipartite: none
content of basic residues: 15.4%
NLS Score: −0.47
KDEL: ER retention motif in the C-terminus: none
ER Membrane Retention Signals:
XXRR-like motif in the N-terminus: ATHR
KKXX-like motif in the C-terminus: QGKA
SKL: peroxisomal targeting signal in the C-terminus: none
PTS2: 2nd peroxisomal targeting signal: none
VAC: possible vacuolar targeting motif: none
RNA-binding motif: none
Actinin-type actin-binding motif:
type 1: none
type 2: none
NMYR: N-myristoylation pattern: none
Prenylation motif: none
memYQRL: transport motif from cell surface to Golgi: none
Tyrosines in the tail: none
Dileucine motif in the tail: none
checking 63 PROSITE DNA binding motifs: none
checking 71 PROSITE ribosomal protein motifs: none
checking 33 PROSITE prokaryotic DNA binding motifs: none
NNCN: Reinhardt's method for Cytoplasmic/Nuclear
discrimination
Prediction: cytoplasmic
Reliability: 89
COIL: Lupas's algorithm to detect coiled-coil regions
total: 0 residues
Final Results (k = 9/23):
43.5%: cytoplasmic
30.4%: nuclear
26.1%: mitochondrial
>> prediction for CG186640-02 is cyt (k = 23)

[0531] A search of the NOVSa protein against the Geneseq database, a proprietary database that contains sequences published in patents and patent publication, yielded several homologous proteins shown in Table E9.

TABLE E9
Geneseq Results for NOV5a

| | | NOV5a | Identities/ | |
|---|---|---|---|---|
| | | Residues/ | Similarities for | |
| Geneseq | Protein/Organism/Length | Match | the Matched | Expect |
| Identifier | [Patent #, Date] | Residues | Region | Value |
| ABG09674 | Novel human diagnostic protein | 1 . . . 253 | 191/254 (75%) | e−113 |
| | #9665 - Homo sapiens, 265 aa. | 11 . . . 264 | 221/254 (86%) | |
| | [WO200175067-A2, 11-OCT-2001] | | | |
| ABG05571 | Novel human diagnostic protein | 1 . . . 253 | 181/258 (70%) | 7e−99 |
| | #5562 - Homo sapiens, 270 aa. | 12 . . . 269 | 209/258 (80%) | |
| | [WO200175067-A2, 11-OCT-2001] | | | |
| ABB64868 | Drosophila melanogaster polypeptide | 4 . . . 253 | 167/251 (66%) | 2e−93 |
| | SEQ ID NO 21396 - Drosophila | 42 . . . 292 | 196/251 (77%) | |
| | melanogaster, 292 aa. | | | |
| | [WO200171042-A2, 27-SEP-2001] | | | |
| ABB66376 | Drosophila melanogaster polypeptide | 16 . . . 253 | 159/239 (66%) | 6e−88 |
| | SEQ ID NO 25920 - Drosophila | 33 . . . 271 | 185/239 (76%) | |
| | melanogaster, 271 aa. | | | |
| | [WO200171042-A2, 27-SEP-2001] | | | |
| ABG19326 | Novel human diagnostic protein | 4 . . . 251 | 161/256 (62%) | 2e−84 |
| | #19317 - Homo sapiens, 333 aa. | 35 . . . 290 | 198/256 (76%) | |
| | [WO200175067-A2, 11-OCT-2001] | | | |

[0532] In a BLAST search of public sequence databases, the NOV5a protein was found to have homology to the proteins shown in the BLASTP data in Table E10.

TABLE E10
Public BLASTP Results for NOV5a

| | | NOV5a | Identities/ | |
|---|---|---|---|---|
| Protein | | Residues/ | Similarities for | |
| Accession | | Match | the Matched | Expect |
| Number | Protein/Organism/Length | Residues | Portion | Value |
| PMHUYM | M - human, 253 aa. | 1 . . . 253 | 250/253 (98%) | e−146 |
| P15259 | Phosphoglycerate mutase 2 (EC | 2 . . . 253 | 247/252 (98%) | e−146 |
| | 5.4.2.1) (EC 5.4.2.4) (EC 3.1.3.13) | 1 . . . 252 | 249/252 (98%) | |
| | (Phosphoglycerate mutase isozyme M) | | | |
| | (PGAM-M) (BPG-dependent PGAM 2) | | | |
| | (Muscle-specific phosphoglycerate | | | |
| | mutase) - Homo sapiens (Human), 252 aa. | | | |
| PMRTYM | phosphoglycerate mutase (EC 5.4.2.1) | 1 . . . 253 | 232/253 (91%) | e−136 |
| | M - rat, 253 aa. | 1 . . . 253 | 241/253 (94%) | |
| P16290 | Phosphoglycerate mutase 2 (EC | 2 . . . 253 | 231/252 (91%) | e−136 |
| | 5.4.2.1) (EC 5.4.2.4) (EC 3.1.3.13) | 1 . . . 252 | 240/252 (94%) | |
| | (Phosphoglycerate mutase isozyme M) | | | |
| | (PGAM-M) (BPG-dependent PGAM 2) | | | |
| | (Muscle-specific phosphoglycerate | | | |
| | mutase) - Rattus norvegicus (Rat), 252 aa. | | | |
| O70250 | Phosphoglycerate mutase 2 (EC | 3 . . . 253 | 227/251 (90%) | e−134 |
| | 5.4.2.1) (EC 5.4.2.4) (EC 3.1.3.13) | 2 . . . 252 | 237/251 (93%) | |
| | (Phosphoglycerate mutase isozyme M) | | | |
| | (PGAM-M) (BPG-dependent PGAM 2) | | | |
| | (Muscle-specific phosphoglycerate | | | |
| | mutase) - Mus musculus (Mouse), 252 aa. | | | |

[0533] PFam analysis predicts that the NOV5a protein contains the domains shown in the Table E11.

TABLE E11
Domain Analysis of NOV5a

| | | Identities/ | |
|---|---|---|---|
| | | Similarities for | |
| Pfam | NOV5a | the Matched | |
| Domain | Match Region | Region | Expect Value |
| PGAM | 4 . . . 230 | 132/230 (57%) | 1.3e−132 |
| | | 209/230 (91%) | |

### EXAMPLE E3

### Expression Profiles of the Human Phosphoglycerate Mutase 2 (PGM2) and Human Phosphoglycerate Mutase 1 (PGM1) Genes

[0534] The protocol for quantitative expression analysis is disclosed in Example Q9.

[0535] Expression of genes CG186640-02 (PGM2) and CG115294-01 (PGM1) was assessed using the primer-probe sets Ag2379 and Ag6474 described in Tables E12 and E13. Results of the RTQ-PCR runs are shown in Tables E14 and E15. Ag2379 and Ag6474 are specific for CG115294-01 and CG186640-02 respectively.

TABLE E12
Probe Name Ag2379

| | | | Start | SEQ ID |
|---|---|---|---|---|
| Primers | Sequences | Length | Position | No |
| Forward | 5′-ctacgagatgctggctatgagt-3′ | 22 | 164 | 201 |
| Probe | TET-5′-ttgacatctgcttcacctcagtgcag-3′- | 26 | 186 | 202 |
| | TAMRA | | | |
| Reverse | 5′-gatcaatggcatctagcactgt-3′ | 22 | 236 | 203 |

[0536] TABLE E13.
Probe Name Ag6474

| | | | Start | SEQ ID |
|---|---|---|---|---|
| Primers | Sequences | Length | Position | No |
| Forward | 5′-ggaggagcaggtgaagatct-3′ | 20 | 327 | 204 |
| Probe | TET-5′-cgatggacgagaagcacccctactac-3′- | 26 | 377 | 205 |
| | TAMRA | | | |
| Reverse | 5′-ccgacgctccttgctaa-3′ | 17 | 410 | 206 |

[0537] TABLE E14
General_screening_panel_v1.6

| | Rel. Exp. (%) | Rel. Exp. (%) |
|---|---|---|
| | Ag6474, Run | Ag2379, Run |
| Tissue Name | 277225783 | 277227794 |
| Adipose | 3.1 | 3.0 |
| Melanoma* Hs688(A).T | 0.0 | 52.1 |
| Melanoma* Hs688(B).T | 0.1 | 42.3 |
| Melanoma* M14 | 0.0 | 42.6 |
| Melanoma* LOXIMVI | 0.0 | 51.8 |
| Melanoma* SK-MEL-5 | 0.1 | 45.1 |
| Squamous cell | 0.0 | 29.5 |
| carcinoma SCC-4 | | |
| Testis Pool | 6.1 | 4.6 |
| Prostate ca.* | 0.1 | 40.6 |
| (bone met) PC-3 | | |
| Prostate Pool | 1.0 | 3.2 |
| Placenta | 0.0 | 6.6 |
| Uterus Pool | 0.1 | 2.1 |
| Ovarian ca. OVCAR-3 | 0.8 | 39.8 |
| Ovarian ca. SK-OV-3 | 0.0 | 25.2 |
| Ovarian ca. OVCAR-4 | 0.1 | 32.1 |
| Ovarian ca. OVCAR-5 | 0.6 | 42.3 |
| Ovarian ca. IGROV-1 | 1.4 | 32.8 |
| Ovarian ca. OVCAR-8 | 0.1 | 12.9 |
| Ovary | 0.1 | 3.8 |
| Breast ca. MCF-7 | 0.0 | 31.6 |
| Breast ca. MDA-MB-231 | 0.1 | 100.0 |
| Breast ca. BT 549 | 0.0 | 54.0 |
| Breast ca. T47D | 0.1 | 13.3 |
| Breast ca. MDA-N | 0.0 | 17.6 |
| Breast Pool | 0.0 | 4.5 |
| Trachea | 0.5 | 5.6 |
| Lung | 0.2 | 1.4 |
| Fetal Lung | 0.3 | 7.5 |
| Lung ca. NCI-N417 | 0.4 | 18.8 |
| Lung ca. LX-1 | 0.4 | 27.4 |
| Lung ca. NCI-H146 | 6.3 | 8.0 |
| Lung ca. SHP-77 | 12.5 | 43.8 |
| Lung ca. A549 | 0.1 | 43.2 |
| Lung ca. NCI-H526 | 0.2 | 6.6 |
| Lung ca. NCI-H23 | 0.2 | 24.1 |
| Lung ca. NCI-H460 | 0.0 | 18.6 |
| Lung ca. HOP-62 | 0.0 | 27.7 |
| Lung ca. NCI-H522 | 0.1 | 19.8 |
| Liver | 1.0 | 2.1 |
| Fetal Liver | 0.2 | 3.8 |
| Liver ca. HepG2 | 0.5 | 18.3 |
| Kidney Pool | 0.6 | 7.1 |
| Fetal Kidney | 0.4 | 4.7 |
| Renal ca. 786-0 | 0.0 | 56.6 |
| Renal ca. A498 | 0.0 | 21.8 |
| Renal ca. ACHN | 0.0 | 25.7 |
| Renal ca. UO-31 | 0.0 | 33.2 |
| Renal ca. TK-10 | 0.1 | 22.4 |
| Bladder | 0.1 | 8.7 |
| Gastric ca. (liver | 0.1 | 22.8 |
| met.) NCI-N87 | | |
| Gastric ca. KATO III | 0.0 | 39.2 |
| Colon ca. SW-948 | 0.0 | 18.3 |
| Colon ca. SW480 | 0.1 | 62.4 |
| Colon ca.* | 0.1 | 28.7 |
| (SW480 met) SW620 | | |
| Colon ca. HT29 | 0.1 | 26.2 |
| Colon ca. HCT-116 | 0.1 | 79.6 |
| Colon ca. CaCo-2 | 0.1 | 31.6 |
| Colon cancer tissue | 0.2 | 11.5 |
| Colon ca. SW1116 | 0.0 | 11.9 |
| Colon ca. Colo-205 | 0.0 | 14.8 |
| Colon ca. SW-48 | 0.0 | 14.8 |
| Colon Pool | 0.2 | 4.9 |
| Small Intestine Pool | 0.4 | 3.6 |
| Stomach Pool | 0.0 | 3.6 |
| Bone Marrow Pool | 0.1 | 1.9 |
| Fetal Heart | 27.0 | 6.0 |
| Heart Pool | 31.0 | 1.9 |
| Lymph Node Pool | 0.1 | 6.5 |
| Fetal Skeletal Muscle | 22.1 | 1.3 |
| Skeletal Muscle Pool | 100.0 | 0.8 |
| Spleen Pool | 0.2 | 4.5 |
| Thymus Pool | 0.7 | 5.6 |
| CNS cancer | 0.0 | 64.2 |
| (glio/astro) U87-MG | | |
| CNS cancer | 0.0 | 57.8 |
| (glio/astro) U-118-MG | | |
| CNS cancer | 0.2 | 38.7 |
| (neuro; met) SK-N-AS | | |
| CNS cancer (astro) SF-539 | 0.4 | 45.7 |
| CNS cancer (astro) SNB-75 | 0.0 | 50.7 |
| CNS cancer (glio) SNB-19 | 1.4 | 32.1 |
| CNS cancer (glio) SF-295 | 0.2 | 55.9 |
| Brain (Amygdala) Pool | 1.0 | 13.6 |
| Brain (cerebellum) | 13.0 | 33.0 |
| Brain (fetal) | 0.9 | 11.0 |
| Brain (Hippocampus) Pool | 1.6 | 12.9 |
| Cerebral Cortex Pool | 0.9 | 13.0 |
| Brain (Substantia nigra) Pool | 2.1 | 11.3 |
| Brain (Thalamus) Pool | 1.4 | 17.7 |
| Brain (whole) | 1.0 | 15.2 |
| Spinal Cord Pool | 3.3 | 9.5 |
| Adrenal Gland | 0.3 | 11.0 |
| Pituitary gland Pool | 1.3 | 1.7 |
| Salivary Gland | 0.4 | 4.1 |
| Thyroid (female) | 0.9 | 3.6 |
| Pancreatic ca. CAPAN2 | 0.0 | 19.5 |
| Pancreas Pool | 0.4 | 3.6 |

[0538] TABLE E15
Panel 5 Islet

| | Rel. Exp. (%) | Rel. Exp. (%) |
|---|---|---|
| | Ag6474, Run | Ag2379, Run |
| Tissue Name | 268366291 | 263467358 |
| 97457_Patient-02go_adipose | 0.0 | 4.4 |
| 97476_Patient-07sk_skeletal | 8.3 | 4.7 |
| muscle | | |
| 97477_Patient-07ut_uterus | 0.0 | 6.2 |
| 97478_Patient-07pl_placenta | 0.0 | 10.5 |
| 99167_Bayer Patient 1 | 0.5 | 100.0 |
| 97482_Patient-08ut uterus | 0.0 | 8.0 |
| 97483_Patient-08pl_placenta | 0.0 | 8.4 |
| 97486_Patient-09sk_skeletal | 17.6 | 1.2 |
| muscle | | |
| 97487_Patient-09ut_uterus | 0.1 | 9.7 |
| 97488_Patient-09pl_placenta | 0.0 | 5.5 |
| 97492_Patient-10ut_uterus | 0.0 | 9.6 |
| 97493_Patient-10pl_placenta | 0.0 | 16.4 |
| 97495_Patient-11go_adipose | 0.0 | 4.4 |
| 97496_Patient-11sk_skeletal | 69.7 | 2.2 |
| muscle | | |
| 97497_Patient-11ut_uterus | 0.0 | 13.1 |
| 97498_Patient-11pl_placenta | 0.0 | 8.9 |
| 97500_Patient-12go_adipose | 0.0 | 9.7 |
| 97501_Patient-12sk_skeletal | 100.0 | 6.5 |
| muscle | | |
| 97502_Patient-12ut_uterus | 0.1 | 10.8 |
| 97503_Patient-12pl_placenta | 0.0 | 9.1 |
| 94721_Donor 2 U - | 0.0 | 35.6 |
| A_Mesenchymal Stem Cells | | |
| 94722_Donor 2 U - | 0.0 | 32.5 |
| B_Mesenchymal Stem Cells | | |
| 94723_Donor 2 U - | 0.2 | 22.2 |
| C_Mesenchymal Stem Cells | | |
| 94709_Donor 2 AM - A_adipose | 0.0 | 60.3 |
| 94710_Donor 2 AM - B_adipose | 0.0 | 42.3 |
| 94711_Donor 2 AM - C_adipose | 0.0 | 27.4 |
| 94712_Donor 2 AD - A_adipose | 0.2 | 35.8 |
| 94713_Donor 2 AD - B_adipose | 0.1 | 59.0 |
| 94714_Donor 2 AD - C_adipose | 0.3 | 56.6 |
| 94742_Donor 3 U - | 0.0 | 26.2 |
| A_Mesenchymal Stem Cells | | |
| 94743_Donor 3 U - | 0.0 | 36.1 |
| B_Mesenchymal Stem Cells | | |
| 94730_Donor 3 AM - A_adipose | 0.0 | 54.7 |
| 94731_Donor 3 AM - B_adipose | 0.0 | 42.9 |
| 94732_Donor 3 AM - C_adipose | 0.0 | 51.1 |
| 94733_Donor 3 AD - A_adipose | 0.0 | 96.6 |
| 94734_Donor 3 AD - B_adipose | 0.0 | 49.0 |
| 94735_Donor 3 AD - C_adipose | 0.0 | 80.1 |
| 77138_Liver_Hep G2untreated | 0.2 | 46.3 |
| 73556_Heart_Cardiac stromal | 0.0 | 12.8 |
| cells (primary) | | |
| 81735_Small Intestine | 0.2 | 11.0 |
| 72409_Kidney_Proximal | 0.0 | 18.4 |
| Convoluted Tubule | | |
| 82685_Small intestine_Duodenum | 0.0 | 10.9 |
| 90650_Adrenal_A | 0.0 | 14.6 |
| drenocortical adenoma | | |
| 72410_Kidney_HRCE | 0.2 | 72.7 |
| 72411_Kidney_HRE | 0.1 | 34.2 |
| 73139_Uterus_Uterine | 0.0 | 19.1 |
| smooth muscle cells | | |

[0539] General screening panel v1.6 Summary: PGM2 is specifically expressed in skeletal muscle, which is consistent with the literature data. PGM1 is ubiquitously expressed with higher in expression in the cerebellum compared to PGM2 (CTs=26.8 vs. 29.5) and conversely is lower in skeletal muscle than PGM2 (CTs=32.2 vs 26.6). Specific expression of PGM2 in skeletal muscle suggests that a drug would target preliminary skeletal muscle and would not interfere significantly with glycolysis in other tissues, specifically in brain and pancreatic islets.

[0540] Panel 5 Islet Summary: In Panel 5I, PGM2 is expressed only in skeletal muscle which is in agreement with the expression pattern of Panel 1.4. Moreover, PGM2 is significantly up-regulated in diabetic muscle (patient 12) relative to non-diabetic skeletal muscle (patients 7, patient 9, patient 11). These results further support the hypothesis that increases in phosphoglycerate mutase level/activity may contribute to the development of diabetes. Therefore, inhibition of PGM2 may be beneficial for the treatment of diabetes. PGM1 is more widely expressed with high expression in islet cells (Bayer patient 1).

### EXAMPLE E4

### Assays for Modulators of Phosphoglycerate Mutase 2

[0541] One potential assay that may be used to screen for modulators of Phosphoglycerate mutase 2 is to measure the production of glycerate-3-phosphate formed in following reaction catalysed by phosphoglycerate mutase:
2-phospho-D-glycerate+2,3-diphosphoglycerate <=>3-phospho-D-glycerate+2,3-diphosphoglycerate

[0542] Production of glycerate-3-phosphate could be measured by reaction coupled to phophoglycerate kinase and glyceraldehydephosphate dehydrogenase as described in Rosa R, Blouquit Y, Calvin M C, Prome D, Prome J C, Rosa J. Isolation, characterization, and structure of a mutant 89 Arg—Cys bisphosphoglycerate mutase. Implication of the active site in the mutation. J Biol. Chem. 1989 May 15; 264 (14):7837-43; PMID: 2542247.

[0543] Our results indicate that a modulator of Phosphoglycerate mutase 2 activity, such as an inhibitor, activator, antagonist, or agonist of Phosphoglycerate mutase 2 may be useful for treatment of such disorders as obesity, diabetes, and insulin resistance, as well as for enhancement of insulin secretion.

F. NOV6—Adenosine A1 Receptor

[0544] Adenosine A1 receptor (Adora1) is a G-protein coupled receptor found at the plasma membrane of multiple cell types. Adora1 is believed to be involved in heart contractility, adipose tissue lipolysis, glomerular filtration and tubulo-glomerular feedback in the kidney, and sympathetic and parasympathetic activity in the nervous system. (Fredholm B B, Ijzerman A P, Jacobson K A, Klotz K N, Linden J, International Union of Pharmacology. XXV. Nomenclature and classification of adenosine receptors. Pharmacol Rev. 2001 December; 53 (4):527-52. Review. PMID: 11734617) It is a member of the adenosine receptor family comprised of adenosine A1, A2A, A2B and A3 receptors. Adenosine is the preferred endogenous ligand for these receptors. However, the adenosine receptors are not highly homologous, with the greatest percent identity found between the A1 and the A2B receptors (56% sequence identity at the protein level). The low level of sequence identity is illustrated by the fact that selective agonists and antagonists have been identified for the all of the adenosine receptors with the exception of A2B, which lacks a selective antagonist (Fredholm B B, IJzerman A P, Jacobson K A, Klotz K N, Linden J, International Union of Pharmacology. XXV. Nomenclature and classification of adenosine receptors. Pharmacol Rev. 2001 December; 53 (4):527-52. Review. PMID: 11734617).

[0545] Adenosine is the main agonist for this receptor family. Under normal conditions, adenosine is continuously formed intracellularly in a variety of cell types, as well as extracellularly in a variety of tissue compartments. The continuous synthesis and breakdown of adenosine in any cell type or tissue compartment varies with physiological circumstances, and this variance implies that the biology of adenosine receptors will be complicated, as well as tissue and cell-type specific. Adenosine A1 receptor knockout mice that do not respond to Adora1 agonists have been reported (Johansson B, Halldner L, Dunwiddie T V, Masino S A, Poelchen W, Gimenez-Llort L, Escorihuela R M, Fernandez-Teruel A, Wiesenfeld-Hallin Z, Xu X J, Hardemark A, Betsholtz C, Herlenius E, Fredholm B B. Hyperalgesia, anxiety, and decreased hypoxic neuroprotection in mice lacking the adenosine A1 receptor. Proc Natl Acad Sci USA. 2001 Jul. 31; 98 (16):9407-12. PMID: 11470917). The mice were viable, fertile and without any gross abnormalities. Although Adora1 is hypothesized to be important for cardiovascular function, arterial blood pressure and heart rates were indistinguishable between A1 receptor knockouts and wild type mice (Johansson et. al.). To date, our knowledge of the role of adenosine A1 receptors in normal physiology is incomplete.

[0546] The distribution of A1 receptors in tissues has been studied using selective radioligands (Fredholm et. al.). High expression has been reported in the brain (cortex, cerebellum, hippocampus), dorsal horn of the spinal cord, eye and adrenal gland (Fredholm et. al.). Intermediate levels of Adora1 were reported in other brain regions, skeletal muscle, liver, kidney, adipose tissue, salivary glands, esophagus, colon and testis. The specific role of Adora1 in all of these diverse cell types is not currently known.

[0547] Insulin-secreting beta cells are located in the pancreatic islets of Langerhans. Insulin secretion can be measured while perfusing the isolated pancreas with glucose (the physiologic signal). Structural analogues of adenosine have been used to perfuse the isolated rat pancreas, with a resultant decrease in insulin secretion. (Hillaire-Buys D, Chapal J, Bertrand G, Petit P, Loubatieres-Mariani M M. Purinergic receptors on insulin-secreting cells. Fundam Clin Pharmacol 1994 8 (2):117-27. PMID: 8020870). However, this result did not confirm Adora1 specificity (because adenosine acts on all adenosine receptor subtypes) and was not specific for human islet cells.

[0548] Aminophylline is a non-selective but potent adenosine receptor family antagonist. Intravenous administration of aminophylline stimulated insulin secretion in patients with Type 2 diabetes, suggesting that an adenosine receptor family antagonist may be involved in turning on insulin secretion (Arias A M, Bisschop P H, Ackerman M T, Nijpels G, Endert E, Romijn J A, Sauerwein H P. Aminophylline stimulates insulin secretion in patients with Type 2 diabetes mellitus. Metabolism 2001 September; 50 (9):1030-5. PMID:11555834). The present invention is for the use of a specific Adora1 antagonist to enhance insulin secretion and lower blood glucose. U.S. Pat. No. 6,407,076 describes compounds which are agonists of adenosine A1 receptor and function as inhibitors of lipolysis and may also have the ability to lower elevated blood glucose.

[0549] Adenosine A1 receptor is coupled to the Gαᵢ family of G protein effector systems that inhibit cAMP production (Fredholm et. al.). Cyclic AMP has long been known as a potentiator of neurotransmitter-induced insulin secretion (Harndahl L, Jing X J, Ivarsson R, Degerman E, Ahren B, Manganiello V C, Renstrom E, Holst L S. Important role of phosphodiesterase 3B for the stimulatory action of cAMP on pancreatic beta-cell exocytosis and release of insulin. J Biol. Chem. 2002 Oct. 4; 277 (40):37446-55. PMID: 12169692). The present invention is for the use of a specific Adora1 antagonist to enhance glucose-stimulated insulin secretion (as opposed to neurotransmitter-stimulated insulin secretion).

[0550] We have shown that Adora1 is expressed in a wide variety of human tissues, with highest levels seen in brain and testis. We also documented that Adora1 is expressed in human pancreatic islet cells.

[0551] Type 2 diabetes in man is characterized by increased fasting and post-prandial circulating free fatty acids, and by an insulin secretory defect. The increased levels of free fatty acids are hypothesized to be a major contributor to the insulin secretory defect. The pancreatic islets of Langerhans contain beta cells that secrete insulin in response to increases in blood glucose. Culturing islet cells in vitro with oleate, one of the three most abundant circulating fatty acids in man, provides a means of studying the beta cell secretory defect in Type 2 diabetes. We discovered that islet cells cultured for 5 days in vitro with oleate have a significant deficit in glucose-stimulated insulin secretion and a 1.9-fold upregulation of Adora1 mRNA. Thus, the increased expression of Adora1 in oleate-treated islets reflects increased receptor activation, decreased cAMP levels in the islet cell, and a resultant diminution of insulin secretion. A preferred method of the invention is the use of the adenosine A1 receptor for identifying an antagonist that would be beneficial in the treatment of Type 2 diabetes. As such the current invention embodies the use of recombinantly expressed and/or endogenously expressed protein in various screens to identify such therapeutic antibodies and/or therapeutic small molecules.

[0552] In one embodiment, the present invention describes the specific upregulation of Adora1 mRNA in rat islet cells cultured in oleate. Islets cultured in oleate have a significant deficit in insulin secretion. The upregulation and activation of Adora1 in oleate-cultured islets may be the cause of the suppressed insulin secretion.

[0553] In particular the invention relates to the use of Adora1 protein as a diagnostic and/or target for small molecule drugs and antibody therapeutics. We documented that Adora1 is expressed in a wide variety of human tissues, with highest expression in brain and testis. We also discovered novel expression of Adora1 in human pancreatic islet cells. Furthermore, we have discovered that adenosine A1 receptor mRNA is upregulated 1.9-fold in islets treated with oleate, which has been identified in the art to suppress glucose-stimulated insulin secretion, versus control islets. The increased expression of Adora1 in oleate-treated islets reflects increased receptor activation, decreased cAMP levels in the islet cell, and a resultant diminution of insulin secretion. Preferably, in one aspect, agonist activation of Adora1 decreases cellular cAMP accumulation. Thus, the present invention describes a role for activation of Adora1 in the inhibition of glucose-stimulated (but not neurotransmitter-stimulated) insulin secretion.

[0554] Not to be limited by a particular mechanism of action, we have discovered that inhibition of Adora1 may have beneficial effects for treating Type 2 diabetes. Specifically, Adora1 is expressed in several metabolic tissues, including pancreatic islets of Langerhans. Thus, we have shown that culture of islets in 2 mM oleate for 5 days results in increased expression of islet cell Adora1. Increased expression and/or activation of Adora1 may contribute to the insulin secretory defect in oleate-treated islets and patients with Type 2 diabetes. The finding that suppression of glucose-stimulated insulin secretion in islet cells is correlated with up-regulation of adenosine A1 receptor mRNA in pancreatic islet cells, indicates a role for Adora1 in insulin secretion and glucose homeostasis. Therefore, an antagonist of Adora1 is useful for the treatment of diabetes. In a particular embodiment of the invention, Adora1 is a target for screening antagonists of Adora1 expression or activity. As such the current invention embodies the use of recombinantly expressed and/or endogenously expressed protein in various screens to identify adenosine A1 receptor antagonist therapeutic antibodies and/or therapeutic small molecules beneficial in the treatment of Type 2 diabetes.

[0555] Furthermore, our results indicate that a modulator of Adora1 activity, such as an inhibitor, activator, antagonist, or agonist of Adora1 may be useful for treatment of such disorders as obesity, diabetes, and insulin resistance, as well as for enhancement of insulin secretion.

Discovery Process

[0556] The following sections describe the study design(s) and the techniques used to identify the Adenosine A1 receptor—encoded protein and any variants, thereof, as being suitable as diagnostic markers, targets for an antibody therapeutic and targets for a small molecule drugs for Obesity and Diabetes.

### EXAMPLE F1

### Rat Pancreatic Islets Study

[0557] A protocol Rat Pancreatic Islet study is disclosed in Example Q2.

[0558] Greater than 80% of Type 2 diabetes in man is associated with obesity. An important clinical goal in the early phases of Type II diabetes is to increase insulin secretion from the beta cells of the pancreas. Numerous agents have been identified that can modulate insulin secretion experimentally and in therapeutic situations. When applied to isolated rat pancreatic islets, the changes in gene expression can be correlated with insulin secretion. In this study, acute and chronic changes in gene expression were examined from islets treated with an agent after short (4 hour) and long-term (5 days) exposure, respectively, compared with the basal state (11 mM glucose). The agents included elevated (25 mM) glucose, glucose (11 mM) and exendin-4 (1 nM), glucose (11 mM) and glybenclamide (50 uM) and glucose (11 mM) and oleate (2 mM). A characteristic of obesity-related Type 2 diabetes is an increase in both fasting and post-prandial circulating free fatty acids. The increased levels of free fatty acids are hypothesized to be a major contributor to the insulin secretory defect seen in this disease. Culturing islet cells in vitro with oleate, one of the three most abundant circulating fatty acids in humans provides a means of studying the beta cell secretory defect in Type 2 diabetes. Protocol for differential gene expression analysis, GeneCalling®, is disclosed in Example Q7.

Results

[0559] A fragment of the rat Adenosine A1 Receptor gene was initially found to be up-regulated by 1.9 fold in a sample derived from oleate treated islet cells, 5 days after exposure to the oleate, a known suppressor of insulin secretion, relative to islet cells treated with glucose alone using CuraGen's GeneCalling® method of differential gene expression. A differentially expressed rat gene fragment migrating, at approximately 370 nucleotides in length was definitively identified as a component of the rat Adenosine A1 Receptor cDNA. The method of competitive PCR was used for confirmation of the gene assessment. The electropherographic peaks corresponding to the gene fragment of the rat Adenosine A1 Receptor were ablated when a gene-specific primer (shown Table F1) competes with primers in the linker-adaptors during the PCR amplification. The peaks at 370 nt in length were ablated in the sample from both the oleate treated and basal state islet cells.

TABLE F1

The sequence of the 370 nucleotide-long gene fragment and the gene-
specific primers used for competitive PCR are indicated on the cDNA
sequence of the rat adenosine A1 receptor fragment (from 1003 to
2337; SEQ ID NO:207) and are shown below in bold. The gene-specific
primers at the 5′ and 3′ ends of the fragment are
underlined.

| | |
|---|---|
| 1003 | GCCAAGTCGC TGGCCCTCAT CCTCTTCCTC TTTGCCCTCA GCTGGCTGCC GCTGCATATC |
| 1063 | TTGAACTGTA TCACCCTCTT CTGCCCCACC TGCCAGAAAC CCAGCATTCT GATCTACATC |
| 1123 | GCCATCTTCC TCACACACGG CAACTCCGCC ATGAACCCCA TCGTCTATGC CTTCCGGATC |
| 1183 | CACAAGTTCC GGGTCACCTT TCTGAAGATT TGGAATGACC ACTTCCGATG CCAGCCTAAG |
| 1243 | CCTCCCATCG ATGAAGACCT CCCAGAGGAG AAAGCTGAGG ACTAGACTCT GCCTTGCTCC |
| 1303 | GTCTAGCCCA TGCCCAGCGG CTCTCTGTTC AACTCCCACG TCCTCCCTGT CCCACCCTGT |
| 1363 | CCCACTGTCC CTCCTCAGTT TTCCCAGCTG GGGTGTAGGC TGTGGCATAG CGCGCATCTT |
| 1423 | TTCTTAAAGC TTTTACTTTG AGACGTCATG GAAAACTTAA GAGGTACACA TGGAGAAGAC |
| 1483 | ATGATCACAG AAGGGAAACA GCATAGAAGC ATCGATGCCT GCAGCTAGTG CTGGAGCTGG |
| 1543 | AGCTGGAGTT GAGTTTGACA TGATACAGGG ACTGCAGGAA TGAACTAGTA TTCCTCTCCT |
| 1603 | TCTTCCTCAC CCTCACCCTC CACAGAATCC ACACCAACCT CCTCATAATC CTTCTCTAGG |
| 1663 | GCAGCCATGT CCTCACGGGC CTCAGAGAAC TCTCCCTCCT CCATGCCCTC ACCCACGTAC |
| 1723 | CAGTGCACAA AGGCACGCTT GGCATACATC AGATCAAACT TGTGATCCAG GCGAGCCCAA |
| 1783 | GCCTCAGCAA TGGCTGTGGT GTTGCTCAGC ATACACACAG CTCTCTGGAC CTTGGCCAGG |
| 1843 | TCGCCACCAG GTACCACAGT GGGAGGCTGG TAATTAATGC CAACCTTGAA GCCAGTGGGG |
| 1903 | CACCAGTCCA CAAACTGGAT GGTACGCTTG GTCTTGATGG TGGCAATGGC AGCATTGACA |
| 1963 | TCTTTGGGGA CCACATCACC ACGGTACAGC AGGCAGCAAG CCATGTATTT ACCATGGCGA |
| 2023 | GGGTCACATT TCACCATCTG GTTGGCTGGC TCAAAGCAGG CATTGGTGAT CTCTGCTACA |
| 2083 | GAAAGCTGTT CATGGTAGGC TTTCTCAGCA GAGATGACAG GGGCATAAGT GGCCAGAGGG |
| 2143 | AAGTGGATGC GAGGGTAGGG CACCAGGTTG GTCTGGAATT CTGTCAGATC AACATTCAGG |
| 2203 | GCCCCATCAA ATCTGAGGGA AGCAGTGATG GAAGACACAA TCTGGCTAAT AAGGCGGTTA |
| 2263 | AGGTTAGTGT AGGTTGGGCG CTCAATGTCG AGGTTTCTAC GACAGATGTC ATAGATGGCC |
| 2323 | TCATTGTCTA CCATG |

[0560] In addition, a second fragment of the rat Adenosine A1 Receptor gene was found to be up-regulated by 1.8 fold in the same sample of oleate treated islet cells above, (5 days after exposure to the oleate). This differentially expressed rat gene fragment migrating at approximately 383.4 nucleotides in length was also definitively identified as a component of the rat Adenosine A1 Receptor cDNa by the method of competitive PCR using a gene-specific primer (shown Table F2) to compete with primers in the linker-adaptors during the PCR amplification. The electropherographic peaks corresponding to the gene fragment at 383 nt in length were ablated in the sample from both the oleate treated and basal state islet cells.

TABLE F2

The sequence of the 383 nucleotide-long gene fragment (from 2178 to
2559) and the gene-specific primers used for competitive PCR are
indicated on the cDNA sequence of the rat adenosine A1 receptor
fragment (SEG ID NO:208) are shown in bold. The gene-specific primers
at the 5′ and 3′ ends of the fragment are underlined.

1697 CCTCCTCCAT GCCCTCACCC ACGTACCAGT GCACAAAGGC ACGCTTGGCA TACATCAGAT
1757 CAAACTTGTG ATCCAGGCGA GCCCAAGCCT CAGCAATGGC TGTGGTGTUG CTCAGCATAC
1817 ACACAGCTCT CTGGACCTTG GCCAGGTCGC CACCAGGTAC CACAGTGGGA GGCTGGTAAT
1877 TAATGCCAAC CTTGAAGCCA GTGGGGCACC AGTCCACAAA CTGGATGGTA CGCTTGGTCT
1937 TGATGGTGGC AATGGCAGCA TTGACATCTT TGGGGACCAC ATCACCACGG TACAGCAGGC
1997 AGCAAGCCAT GTATTTACCA TGGCGAGGGT CACATTTCAC CATCTGGTTG GCTGGCTCAA
2057 AGCAGGCATT GGTGATCTCT GCTACAGAAA GCTGTTCATG GTAGGCTTTC TCAGCAGAGA
2117 TGACAGGGGC ATAAGTGGCC AGAGGGAAGT GGATGCGAGG GTAGGGCACC AGGTTGGTCT
2177 GGAATTCTGT CAGATCAACA TTCAGGGCCC CATCAAATCT GAGGGAAGCA GTGATGGAAG
2237 ACACAATCTG GCTAATAAGG CGGTTAAGGT TAGTGTAGGT TGGGCGCTCA ATGTCGAGGT
2297 TTCTACGACA GATGTCATAG ATGGCCTCAT TGTCTACCAT GAAGGCACAA TCAGAGTGCT
2357 CCAGGGTGGT GTGGGTGGTG AGGATGGAAT TGTAGGGCTC AACCACAGCA GTGGAAACCT
2417 GGGGGGCTGG GTAAATGGAG AACTCCAGCT TGGACTTCTT TCCGTAGTCG ACAGAGAGCC
2477 TCTCCATCAG CAGGGAGGTG AACCCAGAGC CAGTTCCCCC ACCAAAGCTG TGGAAAACCA
2537 AGAAGCCCTG GAGACCCGTG CACTGGTCAG CCAGCTTGCG AATT

### EXAMPLE F2

### Identification of Human Adenosine A1 Receptor Gene Sequences

[0561] The sequence of Human Adenosine A1 Receptor Gene (Acc. No. CG58655-01) was derived by laboratory cloning of cDNA fragments, by in silico prediction of the sequence. cDNA fragments covering either the full length of the DNA sequence, or part of the sequence, or both, were cloned. In silico prediction was based on sequences available in CuraGen's proprietary sequence databases or in the public human sequence databases, and provided either the full-length DNA sequence, or some portion thereof. The protocol for identification of human sequence(s) is disclosed in Example Q8.

[0562] Table F3 shows protein alignment (ClustalW) of the CG58655-01 (SEQ ID NO:56), and rat (scb_gb-m64299_{—}1; SEQ ID NO:209) homologs of the Adenosine A1 receptor. Table F4 shows protein sequence of a rat (scb_gb-m64299_{—}1; SEQ ID NO:209) homolog of the Adenosine A1 receptor.

[image]

TABLE F4

Protein sequence of a rat (scb_gb-m64299_1; SEQ ID NO:209) homolog of
the Adenosine A1 receptor.

>m64299_Rat
MPPYISAFGAAYIGIEVLIALVSVPGNVLVIWAVKVNQALRDATFCFIVSLAVADVAVGALVIPLAILIN
IGPQTYFHTCLMVACPVLILTQSSILALLAIAVDRYLRVKIPLRYKTVVTQRRAAVAIAGCWILSLVVGL
TPMFGWNNLSVVEQDWRANGSVGEPVIKCEFEKVISMEYMVYFNFFVWVLPPLLLMVLIYLEVFYLIRK
QLNKKVSASSGDPQKYYGKELKIAKSLALILFLFALSWLPLHILNCITLFCPTCQKPSILIYIAIFLTHGN
SAMNPIVYAFRIHKFRVTFLKIWNDHFRCQPKPPIDEDLPEEKAED

[0563] The laboratory cloning was performed using one or more of the methods summarized in Example Q8. The NOV6 clone was analyzed, and the nucleotide and encoded polypeptide sequences are shown in Table P5.

TABLE F5
NOV6 Sequence Analysis

| | | |
|---|---|---|
| NOV6a, CG58655-01 | SEQ ID NO:55 | 1003 bp |
| DNA Sequence | ORF Start: ATG at 5 | ORF Stop: TAG at 983 |

CGCCATGCCGCCCTCCATCTCAGCTTTCCAGGCCGCCTACATCGGCATCGAGGTGCTCATCGCCCTGG
TCTCTGTGCCCGGGAACGTGCTGGTGATCTGGGCGGTGAAGGTGAACCAGGCGCTGCGGGATGCCACC
TTCTGCTTCATCGTGTCGCTGGCGGTGGCTGATGTGGCCGTGGGTGCCCTGGTCATCCCCCTCGCCAT
CCTCATCAACATTGGGCCACAGACCTACTTCCACACCTGCCTCATGGTTGCCTGTCCGGTCCTCATCC
TCACCCAGAGCTCCATCCTGGCCCTGCTGGCAATTGCGGTGGACCGCTACCTCCGGGTCAAGATCCCT
CTCCGGTACAAGATGGTGGTGACCCCCCGGAGGGCGGCGGTGGCCATAGCCGGCTGCTGGATCCTCTC
CTTCGTGGTGGGACTGACCCCTATGTTTGGCTGGAACAATCTGAGTGCGGTGGAGCGGGCCTGGGCAG
CCAACGGCAGCATGGGGGAGCCCGTGATCAAGTGCGAGTTCGAGAAGGTCATCAGCATGGAGTACATG
GTCTACTTCAACTTCTTTGTGTGGGTGCTGCCCCCGCTTCTCCTCATGGTCCTCATCTACCTGGAGGT
CTTCTACCTAATCCGCAAGCAGCTCAACAAGAAGGTGTCGGCCTCCTCCGGCGACCCGCAGAAGTACT
ATGGGAAGGAGCTGAAGATCGCCAAGTCGCTGGCCCTCATCCTCTTCCTCTTTGCCCTCAGCTGGCTG
CCTTTGCACATCCTCAACTGCATCACCCTCTTCTGCCCGTCCTGCCACAAGCCCAGCATCCTTACCTA
CATTGCCATCTTCCTCACGCACGGCAACTCGGCCATGAACCCCATTGTCTATGCCTTCCGCATCCAGA
AGTTCCGCGTCACCTTCCTTAAGATTTGGAATGACCATTTCCGCTGCCAGCCTGCACCTCCCATTGAC
GAGGATCTCCCAGAAGAGAGGCCTGATGACTAGACCCCGCCTTCCGCTCCC

| | | | |
|---|---|---|---|
| NOV6a, CG58655-01 | | | |
| Protein Sequence | SEQ ID NO:56 | 326 aa | MW at 36511.2 kD |

MPPSISAFQAAYIGIEVLIALVSVPGNVLVIWAVKVNQALRDATFCFIVSLAVADVAVGALVIPLAIL
INIGPQTYFHTCLMVACPVLILTQSSILALLAIAVDRYLRVKIPLRYKMVVTPRRAAVAIAGCWILSF
VVGLTPMFGWNNLSAVERAWAANGSMGEPVIKCEFEKVISMEYMVYFNFFVWVLPPLLLMVLIYLEVF
YLIRKQLNKKVSASSGDPQKYYGKELKIAKSLALILFLFALSWLPLHILNCITLFCPSCHKPSILTYI
AIFLTHGNSANNPIVYAFRIQKFRVTFLKIWNDHFRCQPAPPIDEDLPEERPDD

| | | |
|---|---|---|
| NOV6b, 268368558 | SEQ ID NO:57 | 1010 bp |
| DNA Sequence | ORF Start: at 3 | ORF Stop: TAG at 993 |

CACCGAATTCCACCATGCCGCCCTCCATCTCAGCTTTCCAGGCCGCCTACATCGGCATCGAGGTGCTC
ATCGCCCTGGTCTCTGTGCCCGGGAACGTGCTGGTGATCTGGGCGGTGAAGGTGAACCAGGCGCTGCG
GGATGCCACCTTCTGCTTCATCGTGTCGCTGGCGGTGGCTGATGTGGCCGTGGGTGCCCTGGTCATCC
CCCTCGCCATCCTCATCAACATTGGGCCACAGACCTACTTCCACACCTGCCTCATGGTTGCCTGTCCG
GTCCTCATCCTCACCCAGAGCTCCATCCTGGCCCTGCTGGCAATTGCTGTGGACCGCTACCTCCGGGT
CAAGATCCCTCTCCGGTACAAGATGGTGGTGACCCCCCGGAGGGCGGCGGTGGCCATAGCCGGCTGCT
GGATCCTCTCCTTCGTGGTGGGACTGACCCCTATGTTTGGCTGGAACAATCTGAGTGCGGTGGAGCGG
GCCTGGGCAGCCAACGGCAGCATGGGGGAGCCCGTGATCAAGTGCGAGTTCGAGAAGGTCATCAGCAT
GGAGTACATGGTCTACTTCAACTTCTTTGTGTGGGTGCTGCCCCCGCTTCTCCTCATGGTCCTCATCT
ACCTGGAGGTCTTCTACCTAATCCGCAAGCAGCTCAACAAGAAGGTGTCGGCCTCCTCCGGCGACCCG
CAGAAGTACTATGGGAAGGAGCTGAAGATCGCCAAGTCGCTGGCCCTCATCCTCTTCCTCTTTGCCCT
CAGCTGGCTGCCTTTGCACATCCTCAACTGCATCACCCTCTTCTGCCCGTCCTGCCACAAGCCCAGCA
TCCTTACCTACATTGCCATCTTCCTCACGCACGGCAACTCGGCCATGAACCCCATTGTCTATGCCTTC
CGCATCCAGAAGTTCCGCGTCACCTTCCTTAAGATTTGGAATGACCATTTCCGCTGCCAGCCTGCACC
TCCCATTGACGAGGATCTCCCAGAAGAGAGGCCTGATGACTAGGGTGGCGGCCGCTAT

| | | | |
|---|---|---|---|
| NOV6b, 268368558 | | | |
| Protein Sequence | SEQ ID NO:58 | 330 aa | MW at 36910.6 kD |

PNSTMPPSISAFQAAYIGIEVLIALVSVPGNVLVIWAVKVNQALRDATFCFIVSLAVADVAVGALVIP
LAILINIGPQTYFHTCLMVACPVLILTQSSILALLAIAVDRYLRVKIPLRYKMVVTPRRAAVAIAGCW
ILSFVVGLTPMFGWNNLSAVERAWAANGSMGEPVIKCEFEKVISMEYMVYFNFFVWVLPPLLLMVLIY
LEVFYLIRKQLNKKVSASSGDPQKYYGKELKIAKSLALILFLFALSWLPLHILNCITLFCPSCHKPSI
LTYIAIFLTHGNSANNPIVYAFRIQKFRVTFLKIWNDHFRCQPAPPIDEDLPEERPDD

[0564] A ClustalW comparison of the above protein sequences yields the following sequence alignment shown in Table F6.

TABLE F6
Comparison of the NOV6 protein sequences.

| | |
|---|---|
| NOV6a | ————MPPSISAFQAAYIGIEVLIALVSVPGNVLVIWAVKVNQALRDATFCFIVSLAVADV |
| NOV6b | PNSTMPPSISAFQAAYIGIEVLIALVSVPGNVLVIWAVKVNQALRDATFCFIVSLAVADV |
| NOV6a | AVGALVIPLAILINIGPQTYFHTCLMVACPVLILTQSSILALLAIAVDRYLRVKIPLRYK |
| NOV6b | AVGALVIPLAILINIGPQTYFHTCLMVACPVLILTQSSILALLAIAVDRYLRVKIPLRYK |
| NOV6a | MVVTPRRAAVAIAGCWILSFVVGLTPMFGWNNLSAVERAWAANGSMGEPVIKCEFEKVIS |
| NOV6b | MVVTPRRAAVAIAGCWILSFVVGLTPMFGWNNLSAVERAWAANGSMGEPVIKCEFEKVIS |
| NOV6a | MEYMVYFMFFVWVLPPLLLMVLIYLEVFYLIRKQLNKKVSASSGDPQKYYGKELKIAKSL |
| NOV6b | MEYMVYFMFFVWVLPPLLLMVLIYLEVFYLIRKQLNKKVSASSGDPQKYYGKELKIAKSL |
| NOV6a | ALILFLFALSWLPLHILNCITLFCPSCHKPSILTYIAIFLTNGNSAMNPIVYAFRIQKFR |
| NOV6b | ALILFLFALSWLPLHILNCITLFCPSCHKPSILTYIAIFLTHGNSAMNPIVYAFRIQKFR |
| NOV6a | VTFLKIWNDHFRCQPAPPIDEDLPEERPDD |
| NOV6b | VTFLKIWNDHFRCQPAPPIDEDLPEERPDD |
| NOV6a | (SEQ ID NO:56) |
| NOV6b | (SEQ ID NO:58) |

[0565] Further analysis of the NOV6a protein yielded the following properties shown in Table F7.

TABLE F7
Protein Sequence Properties NOV6a

| SignalP | Cleavage site between residues 3 1 and 32 | | | |
|---|---|---|---|---|
| analysis: | | | | |
| PSORT II | PSG: a new signal peptide prediction method | | | |
| analysis: | N-region: length 0; pos. chg 0; neg. chg 0 | | | |
| | H-region: length 15; peak value 6.60 | | | |
| | PSG score: 2.20 | | | |
| | GvH: von Heijne's method for signal seq. recognition | | | |
| | GvH score (threshold: −2.1): −4.41 | | | |
| | possible cleavage site: between 59 and 60 | | | |
| | >>> Seems to have no N-terminal signal peptide | | | |
| | ALOM: Klein et al's method for TM region allocation | | | |
| | Init position for calculation: 1 | | | |
| | Tentative number of TMS(s) for the threshold 0.5: 6 | | | |
| | INTEGRAL | Likelihood = | −5.84 | Transmembrane 15-31 |
| | INTEGRAL | Likelihood = | −8.76 | Transmembrane 53-69 |
| | INTEGRAL | Likelihood = | −7.22 | Transmembrane 87-103 |
| | INTEGRAL | Likelihood = | −6.53 | Transmembrane 124-140 |
| | INTEGRAL | Likelihood = | −8.01 | Transmembrane 185-201 |
| | INTEGRAL | Likelihood = | −6.05 | Transmembrane 236-252 |
| | PERIPHERAL | Likelihood = | 4.72 (at 267) | |
| | ALOM score: −8.76 (number of TMSs: 6) | | | |
| | MTOP: Prediction of membrane topology (Hartmann et al.) | | | |
| | Center position for calculation: 22 | | | |
| | Charge difference: 2.0 C(1.0)-N(−1.0) | | | |
| | C > N: C-terminal side will be inside | | | |
| | >>>Caution: Inconsistent mtop result with signal peptide | | | |
| | >>> membrane topology: type 3b | | | |
| | MITDISC: discrimination of mitochondrial targeting seq | | | |
| | R content: | 0 | Hyd Moment(75): | 0.93 |
| | Hyd Moment(95): | 4.05 | G content: | 1 |
| | D/E content: | 1 | S/T content: | 2 |

Score: −5.83
Gavel: prediction of cleavage sites for mitochondrial preseq
R-2 motif at 133 RRA|AV
NUCDISC: discrimination of nuclear localization signals
pat4: none
pat7: none
bipartite: none
content of basic residues: 8.3%
NLS Score: −0.47
KDEL: ER retention motif in the C-terminus: none
ER Membrane Retention Signals: none
SKL: peroxisomal targeting signal in the C-terminus: none
PTS2: 2nd peroxisomal targeting signal: none
VAC: possible vacuolar targeting motif: none
RNA-binding motif: none
Actinin-type actin-binding motif:
type 1: none
type 2: none
NMYR: N-myristoylation pattern: none
Prenylation motif: none
memYQRL: transport motif from cell surface to Golgi: none
Tyrosines in the tail: none
Dileucine motif in the tail: none
checking 63 PROSITE DNA binding motifs: none
checking 71 PROSITE ribosomal protein motifs: none
checking 33 PROSITE prokaryotic DNA binding motifs: none
NNCN: Reinhardt's method for Cytoplasmic/Nuclear discrimination
Prediction: cytoplasmic
Reliability: 94.1
COIL: Lupas's algorithm to detect coiled-coil regions
total: 0 residues
Final Results (k = 9/23):
55.6%: endoplasmic reticulum
11.1%: Golgi
11.1%: vacuolar
11.1%: vesicles of secretory system
11.1%: mitochondrial
>> prediction for CG58655-01 is end (k = 9)

[0566] A search of the NOV6a protein against the Geneseq database, a proprietary database that contains sequences published in patents and patent publication, yielded several homologous proteins shown in Table F8.

TABLE F8
Geneseq Results for NOV6a

| | | NOV6a | Identities/ | |
|---|---|---|---|---|
| | | Residues/ | Similarities for | |
| Geneseq | Protein/Organism/Length | Match | the Matched | Expect |
| Identifier | [Patent #, Date] | Residues | Region | Value |
| ABP96789 | Human COPD related protein SEQ | 1 . . . 326 | 326/326 (100%) | 0.0 |
| | ID NO: 39 - Homo sapiens, 326 aa. | 1 . . . 326 | 326/326 (100%) | |
| | [WO200297127-A2, 05-DEC-2002] | | | |
| ABP81771 | Human adenosine A1 receptor | 1 . . . 326 | 326/326 (100%) | 0.0 |
| | protein SEQ ID NO: 24 - Homo | 1 . . . 326 | 326/326 (100%) | |
| | sapiens, 326 aa. [WO200261087- | | | |
| | A2, 08-AUG-2002] | | | |
| AAR84192 | Human A1 adenosine receptor - | 1 . . . 326 | 326/326 (100%) | 0.0 |
| | Homo sapiens, 326 aa. | 1 . . . 326 | 326/326 (100%) | |
| | [GB2289218-A, 15-NOV-1995] | | | |
| AAR87655 | Human adenosine receptor A1 | 1 . . . 326 | 326/326 (100%) | 0.0 |
| | subtype - Homo sapiens, 326 aa. | 1 . . . 326 | 326/326 (100%) | |
| | [GB2288733-A, 01-NOV-1995] | | | |
| AAR93989 | Human ventricle A1 adenosine | 1 . . . 326 | 326/326 (100%) | 0.0 |
| | receptor - Homo sapiens, 326 aa. | 1 . . . 326 | 326/326 (100%) | |
| | [WO9511681-A1, 04-MAY-1995] | | | |

[0567] In a BLAST search of public sequence databases, the NOV6a protein was found to have homology to the proteins shown in the BLASTP data in Table F9.

TABLE F9
Public BLASTP Results for NOV6a

| | | NOV6a | | |
|---|---|---|---|---|
| Protein | | Residues/ | Identities/ | |
| Accession | | Match | Similarities for the | Expect |
| Number | Protein/Organism/Length | Residues | Matched Portion | Value |
| P30542 | Adenosine A1 receptor - Homo | 1 . . . 326 | 326/326 (100%) | 0.0 |
| | sapiens (Human), 326 aa. | 1 . . . 326 | 326/326 (100%) | |
| P47745 | Adenosine A1 receptor - Cavia | 1 . . . 326 | 311/326 (95%) | 0.0 |
| | porcellus (Guinea pig), 326 aa. | 1 . . . 326 | 318/326 (97%) | |
| A38144 | 326 aa. | 1 . . . 326 | 315/326 (96%) | e−179 |
| Q8BGU7 | Adenosine A1 receptor - Mus | 1 . . . 326 | 309/326 (94%) | e−179 |
| | musculus (Mouse), 326 aa. | 1 . . . 326 | 315/326 (95%) | |
| P28190 | Adenosine A1 receptor - Bos | 1 . . . 326 | 307/326 (94%) | e−179 |
| | taurus (Bovine), 326 aa. | 1 . . . 326 | 315/326 (96%) | |

[0568] PFam analysis predicts that the NOV6a protein contains the domains shown in the Table F10.

TABLE F10
Domain Analysis of NOV6a

| | | Identities/ | |
|---|---|---|---|
| Pfam | NOV6a | Similarities for | |
| Domain | Match Region | the Matched Region | Expect Value |
| 7tm_5 | 4 . . . 278 | 46/347 (13%) | 0.74 |
| | | 165/347 (48%) | |
| 7tm_1 | 26 . . . 288 | 81/287 (28%) | 3.6e−65 |
| | | 204/287 (71%) | |

### EXAMPLE F3

### Human Adenosine A1 Receptor Gene Variants and SNPs

[0569] Variant sequences are included in this application. A variant sequence can include a single nucleotide polymorphism (SNP). A SNP can, in some instances, be referred to as a “cSNP” to denote that the nucleotide sequence containing the SNP originates as a cDNA. A SNP can arise in several ways. For example, a SNP may be due to a substitution of one nucleotide for another at the polymorphic site. Such a substitution can be either a transition or a transversion. A SNP can also arise from a deletion of a nucleotide or an insertion of a nucleotide, relative to a reference allele. In this case, the polymorphic site is a site at which one allele bears a gap with respect to a particular nucleotide in another allele. SNPs occurring within genes may result in an alteration of the amino acid encoded by the gene at the position of the SNP. Intragenic SNPs may also be silent, however, in the case that a codon including a SNP encodes the same amino acid as a result of the redundancy of the genetic code. SNPs occurring outside the region of a gene, or in an intron within a gene, do not result in changes in any amino acid sequence of a protein but may result in altered regulation of the expression pattern for example, alteration in temporal expression, physiological response regulation, cell type expression regulation, intensity of expression, stability of transcribed message.

[0570] Method of novel SNP Identification: SNPs are identified by analyzing sequence assemblies using CuraGen's proprietary SNPTool algorithm. SNPTool identifies variation in assemblies with the following criteria: SNPs are not analyzed within 10 base pairs on both ends of an alignment; Window size (number of bases in a view) is 10; The allowed number of mismatches in a window is 2; Minimum SNP base quality (PHRED score) is 23; Minimum number of changes to score an SNP is 2/assembly position. SNPTool analyzes the assembly and displays SNP positions, associated individual variant sequences in the assembly, the depth of the assembly at that given position, the putative assembly allele frequency, and the SNP sequence variation. Sequence traces are then selected and brought into view for manual validation. The consensus assembly sequence is imported into CuraTools along with variant sequence changes to identify potential amino acid changes resulting from the SNP sequence variation. Comprehensive SNP data analysis is then exported into the SNPCalling database.

[0571] Method of novel SNP Confirmation: SNPs are confirmed employing a validated method know as Pyrosequencing. Detailed protocols for Pyrosequencing can be found in: Alderbom et al. Determination of Single Nucleotide Polymorphisms by Real-time Pyrophosphate DNA Sequencing. (2000). Genome Research. 10, Issue 8, August. 1249-1265.

[0572] In brief, Pyrosequencing is a real time primer extension process of genotyping. This protocol takes double-stranded, biotinylated PCR products from genomic DNA samples and binds them to streptavidin beads. These beads are then denatured producing single stranded bound DNA. SNPs are characterized utilizing a technique based on an indirect bioluminometric assay of pyrophosphate (PPi) that is released from each dNTP upon DNA chain elongation. Following Klenow polymerase-mediated base incorporation, PPi is released and used as a substrate, together with adenosine 5′-phosphosulfate (APS), for ATP sulfurylase, which results in the formation of ATP. Subsequently, the ATP accomplishes the conversion of luciferin to its oxi-derivative by the action of luciferase. The ensuing light output becomes proportional to the number of added bases, up to about four bases. To allow processivity of the method dNTP excess is degraded by apyrase, which is also present in the starting reaction mixture, so that only dNTPs are added to the template during the sequencing. The process has been fully automated and adapted to a 96-well format, which allows rapid screening of large SNP panels.

Results

[0573] The DNA and protein sequences for the novel single nucleotide polymorphic variants of the Adenosine A1 Recepto-like gene of CuraGen Acc. No. CG58655-01 are reported in Table F11. Variants are reported individually but any combination of all or a select subset of variants are also included. In Table F11, the positions of the variant bases and the variant amino acid residues are underlined. In summary, there are 1 variants reported in Table F11. Variant 13381538 is a T to C SNP at 717 bp of the nucleotide sequence that results in a Leu to Pro change at amino acid 238 of protein sequence.

TABLE F11
Variant of nucleotide sequence Acc.
No. CG58655-01 (SEQ ID NO: 55)

| | Nucleotides | | | Amino Acids | | |
|---|---|---|---|---|---|---|
| Variant | Position | Initial | Modified | Position | Initial | Modified |
| 13381538 | 717 | T | C | 238 | Leu | Pro |

[0574] TABLE F12
Sequence of Variants

Nucleotide sequence of variant 13381538 NOV6a1n
(underlined). T/C (SEQ ID NO:167)

| | |
|---|---|
| 1 | CGCCATGCCGCCCTCCATCTCAGCTTTCCAGGCCGCCTACATCGGCATCGAGGTGCTCATCGCCCTGGTCTCTGTGCCCG |
| 81 | GGAACGTGCTGGTGATCTGGGCGGTGAAGGTGAACCAGGCGCTGCGGGATGCCACCTTCTGCTTCATCGTGTCGCTGGCG |
| 161 | GTGGCTGATGTGGCCGTGGGTGCCCTGGTCATCCCCCTCGCCATCCTCATCAACATTGGGCCACAGACCTACTTCCACAC |
| 241 | CTGCCTCATGGTTGCCTGTCCGGTCCTCATCCTCACCCAGAGCTCCATCCTGGCCCTGCTGGCAATTGCGGTGGACCGCT |
| 321 | ACCTCCGGGTCAAGATCCCTCTCCGGTACAAGATGGTGGTGACCCCCCGGAGGGCGGCGGTGGCCATAGCCGGCTGCTGG |
| 401 | ATCCTCTCCTTCGTGGTGGGACTGACCCCTATGTTTGGCTGGAACAATCTGAGTGCGGTGGAGCGGGCCTGGGCAGCCAA |
| 481 | CGGCAGCATGGGGGAGCCCGTGATCAAGTGCGAGTTCGAGAAGGTCATCAGCATGGAGTACATGGTCTACTTCAACTTCT |
| 561 | TTGTGTGGGTGCTGCCCCCGCTTCTCCTCATGGTCCTCATCTACCTGGAGGTCTTCTACCTAATCCGCAAGCAGCTCAAC |
| 641 | AAGAAGGTGTCGGCCTCCTCCGGCGACCCGCAGAAGTACTATGGGAAGGAGCTGAAGATCGCCAAGTCGCTGGCCCCCAT |
| 721 | CCTCTTCCTCTTTGCCCTCAGCTGGCTGCCTTTGCACATCCTCAACTGCATCACCCTCTTCTGCCCGTCCTGCCACAAGC |
| 801 | CCAGCATCCTTACCTACATTGCCATCTTCCTCACGCACGGCAACTCGGCCATGAACCCCATTGTCTATGCCTTCCGCATC |
| 881 | CAGAAGTTCCGCGTCACCTTCCTTAAGATTTGGAATGACCATTTCCGCTGCCAGCCTGCACCTCCCATTGACGAGGATCT |
| 961 | CCCAGAAGAGAGGCCTGATGACTAGACCCCGCCTTCCGCTCCC |

Protein sequence of variant NOV6a1p (underlined). (SEQ ID NO:168)

| | |
|---|---|
| 1 | MPPSISAFQAAYIGIEVLIALVSVPGNVLVIWAVKVNQALRDATFCFIVSLAVADVAVGALVIPLAILINIGPQTYFHTC |
| 81 | LMVACPVLILTQSSILALLAIAVDRYLRVKIPLRYKMVVTPRRAAVAIAGCWILSFVVGLTPMFGWNNLSAVERAWAANG |
| 161 | SMGEPVIKCEFEKVISMEYMVYFNFFVWVLPPLLLMVLIYLEVFYLIRKQLNKKVSASSGDPQKYYGKELKIAKSLAPIL |
| 241 | FLFALSWLPLHILNCITLFCPSCHKPSILTYIAIFLTHGNSAMNPIVYAFRIQKFRVTFLKIWNDHFRCQPAPPIDEDLP |
| 321 | EERPDD |

Alteration effect

Leu to Pro

### EXAMPLE F4

### Expression Profile of the Human Adenosine A1 Receptor Gene (CG58655-01)

[0575] The protocol for quantitative expression analysis is disclosed in Example Q9.

[0576] Expression of gene CG58655-01 was assessed using the primer-probe set Ag6342, described in Table F 13. Results of the RTQ-PCR runs are shown in Tables F 14, F 15, F 16, and F17.

TABLE F13
Probe Name Ag6342

| | | | Start | SEQ ID |
|---|---|---|---|---|
| Primers | Sequences | Length | Position | No |
| Forward | 5′-ccaccgcactcagattgtt-3′ | 19 | 543 | 210 |
| Probe | TET-5′agccaaacataggggtcagtcccac-3′- | 25 | 564 | 211 |
| | TAMRA | | | |
| Reverse | 5′-atagccggctgctggat-3′ | 17 | 602 | 212 |

[0577] TABLE F14
General screening panel v1.5

| | Rel. Exp. (%) |
|---|---|
| | Ag6342, Run |
| Tissue Name | 259475625 |
| Adipose | 0.8 |
| Melanoma* Hs688(A).T | 7.0 |
| Melanoma* Hs688(B).T | 6.5 |
| Melanoma* M14 | 3.5 |
| Melanoma* LOXIMVI | 0.3 |
| Melanoma* SK-MEL-5 | 0.9 |
| Squamous cell carcinoma SCC-4 | 0.1 |
| Testis Pool | 29.3 |
| Prostate ca.* (bone met) PC-3 | 0.0 |
| Prostate Pool | 0.4 |
| Placenta | 18.6 |
| Uterus Pool | 0.6 |
| Ovarian ca. OVCAR-3 | 61.1 |
| Ovarian ca. SK-OV-3 | 2.7 |
| Ovarian ca. OVCAR-4 | 22.1 |
| Ovarian ca. OVCAR-5 | 24.5 |
| Ovarian ca. IGROV-1 | 36.3 |
| Ovarian ca. OVCAR-8 | 19.5 |
| Ovary | 0.2 |
| Breast ca. MCF-7 | 7.9 |
| Breast ca. MDA-MB-231 | 0.8 |
| Breast ca. BT 549 | 0.3 |
| Breast ca. T47D | 1.0 |
| Breast ca. MDA-N | 1.3 |
| Breast Pool | 0.6 |
| Trachea | 2.5 |
| Lung | 0.2 |
| Fetal Lung | 2.5 |
| Lung ca. NCI-N417 | 4.5 |
| Lung ca. LX-1 | 1.3 |
| Lung ca. NCI-H146 | 4.3 |
| Lung ca. SHP-77 | 0.0 |
| Lung ca. A549 | 1.7 |
| Lung ca. NCI-H526 | 1.5 |
| Lung ca. NCI-H23 | 0.6 |
| Lung ca. NCI-H460 | 0.0 |
| Lung ca. HOP-62 | 3.1 |
| Lung ca. NCI-H522 | 2.5 |
| Liver | 0.5 |
| Fetal Liver | 1.0 |
| Liver ca. HepG2 | 0.2 |
| Kidney Pool | 0.6 |
| Fetal Kidney | 2.9 |
| Renal ca. 786-0 | 67.4 |
| Renal ca. A498 | 46.7 |
| Renal ca. ACHN | 100.0 |
| Renal ca. UO-31 | 13.7 |
| Renal ca. TK-10 | 73.7 |
| Bladder | 11.4 |
| Gastric ca. (liver met.) NCI-N87 | 2.9 |
| Gastric ca. KATO III | 0.0 |
| Colon ca. SW-948 | 1.0 |
| Colon ca. SW480 | 5.8 |
| Colon ca.* (SW480 met) SW620 | 0.7 |
| Colon ca. HT29 | 0.1 |
| Colon ca. HCT-116 | 6.3 |
| Colon ca. CaCo-2 | 17.8 |
| Colon cancer tissue | 0.1 |
| Colon ca. SW1116 | 5.6 |
| Colon ca. Colo-205 | 0.0 |
| Colon ca. SW-48 | 0.0 |
| Colon Pool | 1.0 |
| Small Intestine Pool | 0.5 |
| Stomach Pool | 0.3 |
| Bone Marrow Pool | 0.3 |
| Fetal Heart | 9.4 |
| Heart Pool | 2.5 |
| Lymph Node Pool | 2.2 |
| Fetal Skeletal Muscle | 1.6 |
| Skeletal Muscle Pool | 1.5 |
| Spleen Pool | 4.9 |
| Thymus Pool | 2.0 |
| CNS cancer (glio/astro) U87-MG | 1.2 |
| CNS cancer (glio/astro) U-118-MG | 3.0 |
| CNS cancer (neuro; met) SK-N-AS | 0.8 |
| CNS cancer (astro) SF-539 | 10.5 |
| CNS cancer (astro) SNB-75 | 45.4 |
| CNS cancer (glio) SNB-19 | 36.6 |
| CNS cancer (glio) SF-295 | 15.2 |
| Brain (Amygdala) Pool | 60.3 |
| Brain (cerebellum) | 75.3 |
| Brain (fetal) | 22.4 |
| Brain (Hippocampus) Pool | 40.3 |
| Cerebral Cortex Pool | 45.1 |
| Brain (Substantia nigra) Pool | 53.2 |
| Brain (Thalamus) Pool | 56.6 |
| Brain (whole) | 32.3 |
| Spinal Cord Pool | 47.3 |
| Adrenal Gland | 0.4 |
| Pituitary gland Pool | 1.0 |
| Salivary Gland | 3.6 |
| Thyroid (female) | 4.3 |
| Pancreatic ca. CAPAN2 | 0.9 |
| Pancreas Pool | 8.5 |

[0578] TABLE F15
General screening panel v1.7

| | Rel. Exp. (%) |
|---|---|
| | Ag6342, Run |
| Tissue Name | 318350017 |
| Adipose | 21.2 |
| HUVEC | 0.0 |
| Melanoma* Hs688(A).T | 0.0 |
| Melanoma* Hs688(B).T | 0.2 |
| Melanoma (met) SK-MEL-5 | 0.2 |
| Testis | 17.0 |
| Prostate ca. (bone met) PC-3 | 0.1 |
| Prostate ca. DU145 | 5.3 |
| Prostate pool | 0.2 |
| Uterus pool | 0.0 |
| Ovarian ca. OVCAR-3 | 18.2 |
| Ovarian ca. (ascites) SK-OV-3 | 2.2 |
| Ovarian ca. OVCAR-4 | 26.1 |
| Ovarian ca. OVCAR-5 | 0.9 |
| Ovarian ca. IGROV-1 | 100.0 |
| Ovarian ca. OVCAR-8 | 6.8 |
| Ovary | 0.2 |
| Breast ca. MCF-7 | 1.1 |
| Breast ca. MDA-MB-231 | 3.1 |
| Breast ca. BT-549 | 0.1 |
| Breast ca. T47D | 1.2 |
| Breast pool | 0.3 |
| Trachea | 2.2 |
| Lung | 1.4 |
| Fetal Lung | 1.5 |
| Lung ca. NCI-N417 | 2.0 |
| Lung ca. LX-1 | 0.3 |
| Lung ca. NCI-H146 | 4.1 |
| Lung ca. SHP-77 | 0.0 |
| Lung ca. NCI-H23 | 11.2 |
| Lung ca. NCI-H460 | 1.8 |
| Lung ca. HOP-62 | 1.1 |
| Lung ca. NCI-H522 | 3.6 |
| Lung ca. DMS-114 | 1.5 |
| Liver | 0.2 |
| Fetal Liver | 0.2 |
| Kidney pool | 7.2 |
| Fetal Kidney | 3.0 |
| Renal ca. 786-0 | 0.5 |
| Renal ca. A498 | 32.5 |
| Renal ca. ACHN | 80.1 |
| Renal ca. UO-31 | 8.1 |
| Renal ca. TK-10 | 59.0 |
| Bladder | 0.6 |
| Gastric ca. (liver met.) NCI-N87 | 0.2 |
| Stomach | 0.0 |
| Colon ca. SW-948 | 0.0 |
| Colon ca. SW480 | 0.1 |
| Colon ca. (SW480 met) SW620 | 1.9 |
| Colon ca. HT29 | 0.1 |
| Colon ca. HCT-116 | 6.3 |
| Colon cancer tissue | 0.2 |
| Colon ca. SW1116 | 1.9 |
| Colon ca. Colo-205 | 0.0 |
| Colon ca. SW-48 | 0.0 |
| Colon | 0.4 |
| Small Intestine | 0.0 |
| Fetal Heart | 0.8 |
| Heart | 0.6 |
| Lymph Node pool 1 | 0.3 |
| Lymph Node pool 2 | 1.5 |
| Fetal Skeletal Muscle | 1.6 |
| Skeletal Muscle pool | 0.2 |
| Skeletal Muscle | 0.6 |
| Spleen | 1.5 |
| Thymus | 0.2 |
| CNS cancer (glio/astro) SF-268 | 1.5 |
| CNS cancer (glio/astro) T98G | 1.4 |
| CNS cancer (neuro; met) SK-N-AS | 0.0 |
| CNS cancer (astro) SF-539 | 7.6 |
| CNS cancer (astro) SNB-75 | 8.7 |
| CNS cancer (glio) SNB-19 | 9.3 |
| CNS cancer (glio) SF-295 | 0.5 |
| Brain (Amygdala) | 27.9 |
| Brain (Cerebellum) | 52.1 |
| Brain (Fetal) | 28.1 |
| Brain (Hippocampus) | 20.6 |
| Cerebral Cortex pool | 18.8 |
| Brain (Substantia nigra) | 10.3 |
| Brain (Thalamus) | 25.0 |
| Brain (Whole) | 80.7 |
| Spinal Cord | 12.8 |
| Adrenal Gland | 0.3 |
| Pituitary Gland | 0.6 |
| Salivary Gland | 3.3 |
| Thyroid | 1.8 |
| Pancreatic ca. PANC-1 | 2.8 |
| Pancreas pool | 1.7 |

[0579] TABLE F16
Panel 5 Islet

| | Rel. Exp. (%) | Rel. Exp. (%) | Rel. Exp. (%) |
|---|---|---|---|
| | Ag6342, Run | Ag6342, Run | Ag6342, Run |
| Tissue Name | 259472132 | 263594805 | 271406445 |
| 97457_Patient-02go_adipose | 34.4 | 9.6 | 8.4 |
| 97476_Patient-07sk_skeletal muscle | 0.0 | 1.4 | 1.9 |
| 97477_Patient-07ut_uterus | 0.0 | 3.1 | 0.9 |
| 97478_Patient-07pl_placenta | 88.9 | 79.0 | 68.8 |
| 99167_Bayer Patient 1 | 28.5 | 15.3 | 19.2 |
| 97482_Patient-08ut_uterus | 0.0 | 2.0 | 0.0 |
| 97483_Patient-08pl_placenta | 36.9 | 27.7 | 27.5 |
| 97486_Patient-09sk_skeletal muscle | 11.1 | 1.7 | 4.0 |
| 97487_Patient-09ut_uterus | 0.0 | 0.0 | 2.0 |
| 97488_Patient-09pl_placenta | 100.0 | 64.2 | 63.3 |
| 97492_Patient-10ut_uterus | 8.2 | 1.9 | 3.8 |
| 97493_Patient-10pl_placenta | 96.6 | 100.0 | 100.0 |
| 97495_Patient-11go_adipose | 34.4 | 3.3 | 4.1 |
| 97496_Patient-11sk_skeletal muscle | 9.7 | 6.4 | 2.0 |
| 97497_Patient-11ut_uterus | 12.7 | 3.1 | 6.1 |
| 97498_Patient-11pl_placenta | 52.9 | 67.4 | 62.0 |
| 97500_Patient-12go_adipose | 28.1 | 24.0 | 18.6 |
| 97501_Patient-12sk_skeletal muscle | 20.0 | 9.9 | 10.1 |
| 97502_Patient-12ut_uterus | 8.1 | 2.6 | 5.5 |
| 97503_Patient-12pl_placenta | 67.8 | 47.0 | 40.3 |
| 94721_Donor 2 U - A_Mesenchymal Stem Cells | 75.8 | 68.3 | 53.2 |
| 94722_Donor 2 U - B_Mesenchymal Stem Cells | 22.4 | 46.0 | 57.4 |
| 94723_Donor 2 U - C_Mesenchymal Stem Cells | 62.0 | 51.8 | 57.0 |
| 94709_Donor 2 AM - A_adipose | 3.1 | 21.8 | 14.3 |
| 94710_Donor 2 AM - B_adipose | 0.0 | 5.3 | 9.4 |
| 94711_Donor 2 AM - C_adipose | 8.7 | 14.8 | 8.2 |
| 94712_Donor 2 AD - A_adipose | 19.1 | 17.7 | 14.0 |
| 94713_Donor 2 AD - B_adipose | 13.0 | 29.7 | 22.5 |
| 94714_Donor 2 AD - C_adipose | 10.7 | 35.6 | 12.2 |
| 94742_Donor 3 U - A_Mesenchymal Stem Cells | 23.3 | 29.1 | 5.9 |
| 94743_Donor 3 U - B_Mesenchymal Stem Cells | 33.0 | 8.9 | 28.3 |
| 94730_Donor 3 AM - A_adipose | 0.0 | 5.1 | 7.0 |
| 94731_Donor 3 AM - B_adipose | 0.0 | 7.5 | 0.0 |
| 94732_Donor 3 AM - C_adipose | 4.3 | 3.3 | 3.7 |
| 94733_Donor 3 AD - A_adipose | 0.0 | 1.1 | 12.4 |
| 94734_Donor 3 AD - B_adipose | 3.7 | 1.8 | 2.1 |
| 94735_Donor 3 AD - C_adipose | 23.2 | 2.6 | 7.0 |
| 77138_Liver_HepG2untreated | 0.0 | 1.7 | 3.8 |
| 73556_Heart_Cardiac stromal cells (primary) | 0.0 | 0.0 | 0.0 |
| 81735_Small Intestine | 4.2 | 8.3 | 7.6 |
| 72409_Kidney_Proximal Convoluted Tubule | 36.9 | 22.7 | 15.8 |
| 82685_Small intestine Duodenum | 0.0 | 3.8 | 0.0 |
| 90650_Adrenal_Adrenocortical adenoma | 0.0 | 0.0 | 2.0 |
| 72410_Kidney_HRCE | 48.3 | 32.3 | 44.1 |
| 72411_Kidney_HRE | 54.0 | 46.3 | 33.2 |
| 73139_Uterus_Uterine smooth muscle cells | 12.1 | 14.5 | 9.8 |

[0580] TABLE F17
Human Metabolic

| Tissue Name | A |
|---|---|
| 137857 psoas-AA.M.Diab.-hi BMI-6 | 0.2 |
| 135760 psoas-HI.M.Diab.-hi BMI-21 | 4.1 |
| 134827 psoas-CC.M.Diab.-hi BMI-4 | 0.2 |
| 137860 psoas-AA.M.Diab.-med BMI-8 | 0.6 |
| 137834 psoas-CC.M.Diab.-med BMI-2 | 0.5 |
| 137828 psoas-CC.M.Diab.-med BMI-1 | 0.7 |
| 135763 psoas-HI.M.Diab.-med BMI-23 | 0.9 |
| 142740 psoas-AS.M.Diab.-low BMI-20 | 0.4 |
| 134834 psoas-AA.M.Diab.-low BMI-17 | 0.5 |
| 137850 psoas-AS.M.Norm-hi BMI-34 | 1.7 |
| 135769 psoas-HI.M.Norm-hi BMI-31 | 0.2 |
| 135766 psoas-AA.M.Norm-hi BMI-25 | 0.2 |
| 142746 psoas-AA.M.Norm-med BMI-37 | 0.3 |
| 142745 psoas-HI.M.Norm-med BMI-35 | 0.1 |
| 137855 psoas-AA.M.Norm-med BMI-47 | 0.2 |
| 137844 psoas-CC.M.Norm-med BMI-26 | 0.1 |
| 142742 psoas-CC.M.Norm-low BMI-40 | 0.7 |
| 137873 psoas-AS.M.Norm-low BMI-28 | 0.6 |
| 137853 psoas-HI.M.Norm-low BMI-41 | 0.7 |
| 135775 psoas-CC.M.Norm-low BMI-39 | 0.6 |
| 137858 diaphragm-AA.M.Diab.-hi BMI-6 | 0.4 |
| 135772 diaphragm-AS.M.Diab-hi BMI-9 | 0.3 |
| 135761 diaphragm-HI.M.Diab.-hi BMI-21 | 1.3 |
| 134828 diaphragm-CC.M.Diab.-hi BMI-4 | 0.3 |
| 137835 diaphragm-CC.M.Diab.-med BMI-2 | 0.2 |
| 135764 diaphragm-HI.M.Diab.-med BMI-23 | 0.2 |
| 134835 diaphragm-AA.M.Diab.-low BMI-17 | 0.4 |
| 142738 diaphragm-CC.M.Norm-hi BMI-29 | 0.7 |
| 139517 diaphragm-AS.M.Norm-hi BMI-34 | 0.9 |
| 137848 diaphragm-HI.M.Norm-hi BMI-31 | 0.4 |
| 137843 diaphragm-AA.M.Norm-hi BMI-25 | 0.2 |
| 137879 diaphragm-AA.M.Norm-med BMI-47 | 0.2 |
| 137872 diaphragm-CC.M.Norm-med BMI-26 | 0.2 |
| 135773 diaphragm-HI.M.Norm-med BMI-35 | 0.7 |
| 139542 diaphragm-HI.M.Norm-low BMI-4 1 | 1.5 |
| 137877 diaphragm-CC.M.Norm-low BMI-39 | 0.7 |
| 137874 diaphragm-AS.M.Norm-low BMI-28 | 0.4 |
| 141340 subQadipose-AA.M.Diab.-hi BMI-6 | 2.8 |
| 137836 subQadipose-HI.M.Diab.-hi BMI-21 | 0.1 |
| 135771 subQadipose-AS.M.Diab-hi BMI-9 | 0.2 |
| 141329 pancreas-CC.M.Diab.-hi BMI-4 | 1.1 |
| 137862 subQadipose-CC.M.Diab.-med BMI-1 | 0.4 |
| 135762 subQadipose-HI.M.Diab.-med BMI-23 | 0.0 |
| 141338 subQadipose-AS.M.Diab.-low BMI-20 | 0.1 |
| 139547 subQadipose-HI.M.Diab.-low BMI-22 | 0.2 |
| 135757 subQadipose-CC.M.Diab.-low BMI-13 | 0.1 |
| 134832 subQadipose-AA.M.Diab.-low BMI-17 | 0.6 |
| 141332 subQadipose-HI.M.Norm-hi BMI-31 | 0.5 |
| 135767 subQadipose-CC.M.Norm-hi BMI-29 | 0.1 |
| 135765 subQadipose-AS.M.Norm-hi BMI-34 | 1.1 |
| 141339 subQadipose-HI.M.Norm-med BMI-35 | 0.8 |
| 141334 subQadipose-CC.M.Norm-med BMI-26 | 0.4 |
| 139544 subQadipose-AA.M.Norm-med BMI-47 | 1.5 |
| 137875 subQadipose-AA.M.Norm-med BMI-37 | 0.5 |
| 141331 subQadipose-AS.M.Norm-low BMI-28 | 0.5 |
| 137878 subQadipose-HI.M.Norm-low BMI-41 | 0.1 |
| 137876 subQadipose-CC.M.Norm-low BMI-39 | 0.1 |
| 137859 vis.adipose-AA.M.Diab.-hi BMI-6 | 0.0 |
| 135770 vis.adipose-AS.M.Diab-hi BMI-9 | 0.4 |
| 135759 vis.adipose-HI.M.Diab.-hi BMI-21 | 0.1 |
| 143502 vis.adipose-CC.M.Diab.-med BMI-2 | 2.3 |
| 139510 vis.adipose-AA.M.Diab.-med BMI-8 | 0.1 |
| 137861 vis.adipose-CC.M.Diab.-med-l | 0.2 |
| 137839 vis.adipose-HI.M.Diab.-med BMI-23 | 0.0 |
| 139546 vis.adipose-HI.M.Diab.-low BMI-22 | 0.2 |
| 137831 vis.adipose-CC.M.Diab.-low BMI-13 | 0.0 |
| 139522 vis.adipose-HI.M.Norm-hi BMI-31 | 0.5 |
| 139516 vis.adipose-AS.M.Norm-hi BMI-34 | 0.1 |
| 137846 vis.adipose-CC.M.Norm-hi BMI-29 | 0.1 |
| 137841 vis.adipose-AA.M.Norm-hi BMI-25 | 0.3 |
| 139543 vis.adipose-AA.M.Norm-med BMI-47 | 0.7 |
| 139532 vis.adipose-AA.M.Norm-med BMI-37 | 0.1 |
| 139530 vis.adipose-HI.M.Norm-med BMI-35 | 0.2 |
| 139539 vis.adipose-HI.M.Norm-low BMI-41 | 0.0 |
| 139535 vis.adipose-CC.M.Norm-low BMI-40 | 0.1 |
| 137852 vis.adipose-CC.M.Norm-low BMI-39 | 0.7 |
| 135768 vis.adipose-AS.M.Norm-low BMI-28 | 0.1 |
| 141327 liver-CC.M.Diab.-hi BMI-4 | 0.1 |
| 139514 liver-HI.M.Diab.-hi BMI-21 | 0.2 |
| 139526 liver-CC.M.Diab.-med BMI-2 | 0.3 |
| 139511 liver-AA.M.Diab.-med BMI-8 | 0.4 |
| 137840 liver-HI.M.Diab.-med BMI-23 | 0.1 |
| 137827 liver-CC.M.Diab.-med BMI-1 | 0.0 |
| 137838 liver-HI.M.Diab.-low BMI-22 | 0.0 |
| 135758 liver-CC.M.Diab.-low BMI-13 | 0.0 |
| 139519 liver-CC.M.Norm-hi BMI-29 | 0.4 |
| 139518 liver-AA.M.Norm-hi BMI-25 | 0.2 |
| 137849 liver-AS.M.Norm-hi BMI-34 | 0.0 |
| 137847 liver-HI.M.Norm-hi BMI-31 | 0.0 |
| 142741 liver-AA.M.Norm-med BMI-37 | 0.0 |
| 141341 liver-HI.M.Norm-med BMI-35 | 0.1 |
| 141335 liver-CC.M.Norm-med BMI-26 | 0.1 |
| 139540 liver-HI.M.Norm-low BMI-41 | 2.1 |
| 139534 liver-CC.M.Norm-low BMI-39 | 2.6 |
| 139521 liver-AS.M.Norm-low BMI-28 | 0.3 |
| 141328 pancreas-CC.M.Diab.-hi BMI-4 | 1.6 |
| 139525 pancreas-AS.M.Diab.-hi BMI-9 | 0.2 |
| 137856 pancreas-AA.M.Diab.-hi BMI-6 | 4.8 |
| 137837 pancreas-HI.M.Diab.-hi BMI-21 | 1.8 |
| 141337 pancreas-CC.M.Diab.-med BMI-2 | 0.0 |
| 139527 pancreas-CC.M.Diab.-med BMI-1 | 0.1 |
| 139515 pancreas-HI.M.Diab.-med BMI-23 | 8.4 |
| 139512 pancreas-AA.M.Diab.-med BMI-8 | 3.9 |
| 142739 pancreas-AS.M.Diab.-low BMI-20 | 0.9 |
| 139513 pancreas-CC.M.Diab.-low BMI-13 | 0.9 |
| 142743 pancreas-AA.M.Norm-hi BMI-25 | 2.9 |
| 139523 pancreas-HI.M.Norm-hi BMI-31 | 0.3 |
| 139520 pancreas-CC.M.Norm-hi BMI-29 | 0.5 |
| 142744 pancreas-HI.M.Norm-med BMI-35 | 0.4 |
| 139545 pancreas-AA.M.Norm-med BMI-47 | 0.3 |
| 139531 pancreas-AA.M.Norm-med BMI-37 | 0.0 |
| 137871 pancreas-CC.M.Norm-med BMI-26 | 1.5 |
| 139541 pancreas-Hi.M.Norm-low BMI-41 | 0.2 |
| 139537 pancreas-CC.M.Norm-low BMI-40 | 6.7 |
| 139533 pancreas-CC.M.Norm-low BMI-39 | 0.0 |
| 137845 pancreas-AS.M.Norm-low BMI-28 | 1.0 |
| 143530 small intestine-AA.M.Diab.-hi BMI-6 | 0.3 |
| 143529 small intestine-CC.M.Diab.-hi BMI-4 | 0.2 |
| 143538 small intestine-HI.M.Diab.-med BMI-23 | 3.6 |
| 143531 small intestine-AA.M.Diab.-med BMI-8 | 0.2 |
| 143528 small intestine-CC.M.Diab.-med BMI-2 | 0.3 |
| 143537 small intestine-HI.M.Diab.-low BMI-22 | 0.3 |
| 143535 small intestine-AS.M.Diab.-low BMI-20 | 0.4 |
| 143534 small intestine-AA.M.Diab.-low BMI-17 | 0.2 |
| 143544 small intestine-AS.M.Norm-hi BMI-34 | 0.2 |
| 143543 small intestine-HI.M.Norm-hi BMI-31 | 0.8 |
| 143542 small intestine-CC.M.Norm-hi BMI-29 | 0.1 |
| 143539 small intestine-AA.M.Norm-hi BMI-25 | 3.1 |
| 143548 small intestine-AA.M.Norm-med BMI-47 | 0.1 |
| 143547 small intestine-AA.M.Norm-med BMI-37 | 0.1 |
| 143540 small intestine-CC.M.Norm-med BMI-26 | 0.1 |
| 143550 small intestine-CC.M.Norm-low BMI-40 | 0.0 |
| 143549 small intestine-CC.M.Norm-low BMI-39 | 0.2 |
| 143546 small intestine-HI.M.Norm-low BMI-41 | 0.0 |
| 143525 hypothalamus-HI.M.Diab.-hi BMI-21 | 0.2 |
| 143515 hypothalamus-CC.M.Diab.-hi BMW | 0.0 |
| 143513 hypothalamus-AA.M.Diab.-hi BMI-6 | 35.1 |
| 143507 hypothalamus-AS.M.Diab.-hi BMI-9 | 42.0 |
| 143506 hypothalamus-CC.M.Diab.-med BMI-1 | 83.5 |
| 143505 hypothalamus-HI.M.Diab.-med BMI-23 | 0.4 |
| 143509 hypothalamus-AA.M.Diab.-low BMI-17 | 100.0 |
| 143508 hypothalamus-CC.M.Diab.-low BMI-13 | 37.9 |
| 143503 hypothalamus-AS.M.Diab.-low BMI-20 | 60.3 |
| 143522 hypothalamus-HI.M.Norm-hi BMI-31 | 0.0 |
| 143516 hypothalamus-AS.M.Norm-hi BMI-34 | 0.0 |
| 143511 hypothalamus-CC.M.Norm-hi BMI-29 | 33.9 |
| 143504 hypothalamus-AA.M.Norm-hi BMI-25 | 19.9 |
| 143517 hypothalamus-AA.M.Norm-med BMI-47 | 0.3 |
| 143514 hypothalamus-HI.M.Norm-med BMI-35 | 16.8 |
| 143521 hypothalamus-AS.M.Norm-low BMI-28 | 0.1 |
| 143512 hypothalamus-CC.M.Norrn-low BMI-40 | 0.1 |
| 145454 Patient-25pl (CC.Diab.low BMI.no insulin) | 17.6 |
| 110916 Patient-18pl (HI.Diab.obese.no insulin) | 6.0 |
| 110913 Patient-18go (HI.Diab.obese.no insulin) | 0.5 |
| 110911 Patient-17pl (CC.Diab.low BMI.no insulin) | 18.8 |
| 110908 Patient-17go (CC.Diab.low BMI.no insulin) | 1.7 |
| 100752 Patient-15sk (CC.Diab.obese.no insulin) | 1.9 |
| 97828 Patient-13pl (CC.Diab.overwt.no insulin) | 9.7 |
| 160114 Patient 27-ut (CC.Diab.obese.insulin) | 0.5 |
| 160113 Patient 27-pl (CC.Diab.obese.insulin) | 21.5 |
| 160112 Patient 27-sk (CC.Diab.obese.insulin) | 0.5 |
| 160111 Patient 27-go (CC.Diab.obese.insulin) | 1.3 |
| 145461 Patient-26sk (CC.Diab.obese.insulin) | 2.1 |
| 145441 Patient-22sk (CC.Diab.low BMI.insulin) | 6.8 |
| 145438 Patient-22pl (CC.Diab.low BMI.insulin) | 14.8 |
| 145427 Patient-20pl (CC.Diab.overwt.insulin) | 18.8 |
| 97503 Patient- 12pl (CC.Diab.unknown BMI.insulin) | 2.5 |
| 145443 Patient-23pl (CC.Non-diab.overwt) | 11.9 |
| 145435 Patient-21pl (CC.Non-diab.overwt) | 20.3 |
| 110921 Patient- 19pl (CC.Non-diab.low BMI) | 7.9 |
| 110918 Patient-19go (CC.Non-diab.low BMI) | 1.1 |
| 97481 Patient-08sk (CC.Non-diab.obese) | 0.9 |
| 97478 Patient-07pl (CC.Non-diab.obese) | 7.9 |
| 160117 Human Islets-male, obese | 0.2 |
| 145474 PANC1 (pancreas carcinoma) 1 | 2.0 |
| 154911 Capan2 (pancreas adenocarcinoma) | 2.8 |
| 141190 SW579 (thyroid carcinoma) | 0.1 |
| 145489 SK-N-MC (neuroblastoma) 1 | 0.0 |
| 145495 SK-N-SH (neuroblastoma) 1 | 2.1 |
| 145498 U87 MG (glioblastoma) 2 | 10.1 |
| 145484 HEp-2 (larynx carcinoma) 1 | 0.2 |
| 145479 A549 (lung carcinoma) | 2.4 |
| 145488 A427 (lung carcinoma) 2 | 4.0 |
| 145472 FHs 738Lu (normal lung) 1 | 8.1 |
| 141187 SKW6.4 (B lymphocytes) | 0.0 |
| 154644 IM-9 (immunoglobulin secreting lymphoblast) | 0.0 |
| 154645 MOLT-4 (acute lymphoblastic leukemia | 1.0 |
| derived from peripheral blood) | |
| 154648 U-937 (histiocystic lymphoma) | 0.0 |
| 154647 Daudi (Burkitt's lymphoma) | 0.1 |
| 145494 SK-MEL-2 (melanoma) 2 | 1.5 |
| 141176 A375 (melanoma) | 3.4 |
| 154642 SW 1353 (humerus chondrosarcoma) | 12.2 |
| 141179 HT-1080 (fibrosarcoma) | 2.0 |
| 145491 MG-63 (osteosarcoma) 1 | 48.6 |
| 141186 MCF7 (breast carcinoma) | 4.2 |
| 141193 T47D (breast carcinoma) | 2.3 |
| 154641 BT-20 (breast carcinoma) | 35.8 |
| 141175 293 (kidney transformed with adenovirus 5 | 0.7 |
| 141182 HUH hepatomal | 0.0 |
| 141184 HUH7 hepatomal | 0.0 |
| 145478 HT1376 (bladder carcinoma) | 3.6 |
| 145481 SCaBER (bladder carcinoma) | 0.0 |
| 141192 SW620 (lymph node metastatsis, colon | 1.6 |
| carcinoma) 2 | |
| 141180 HT29 (colon carcinoma) 1 | 0.0 |
| 141188 SW480 (colon carcinoma) 1 | 2.5 |
| 154646 CAOV-3 (ovary adenocarcinoma) | 16.4 |
| 141194 HeLa (cervix carcinoma)- 2 | 6.2 |
| 145482 HeLa S3 (cervix carcinoma) 1 | 0.3 |
| 145486 DU145 (prostate carcinoma) | 53.6 |
| 154643 PC-3 (prostate adenocarcinoma) | 0.0 |
| 154649 HCT-8 (ileocecal adenocarcinoma) | 8.3 |

Column A - Rel. Exp. (%) Ag6342, Run 324668027

[0581] General screening panel v1.7 Summary: (Ag6342) The highest expression of this gene was detected in the ovarian cancer cell line IGROV-1 (CT=24). This gene is overexpressed in several ovarian cancer cell lines as compared to normal tissue. This gene was overexpressed in several renal cancer cell lines as compared to normal tissue. Therapeutic modulation of this gene, expressed protein and/or use of antibodies or small molecule drugs targeting the gene or gene product may be useful in the treatment of renal and ovarian cancers.

[0582] Among tissues with metabolic or endocrine function, this gene was significantly expressed at high to moderate levels in pancreas, adipose, adrenal gland, thyroid, pituitary gland, skeletal muscle, heart, liver and the gastrointestinal tract. Therapeutic modulation of this gene, expressed protein and/or use of antibodies or small molecule drugs targeting the gene or gene product will be useful in the treatment of endocrine/metabolically related diseases, such as obesity and diabetes.

[0583] Human Metabolic Summary: (Ag6342) The highest expression of this gene was detected in the hypothalamus of a diabetic patient. This gene is expressed at increased levels in hypothalamus of diabetic patients. This gene was expressed at low levels in visceral adipose, skeletal muscle and pancreas. Therapeutic modulation of this gene, expressed protein and/or use of antibodies or small molecule drugs targeting the gene or gene product will be useful in the treatment of endocrine/metabolically related diseases, such as obesity and diabetes.

[0584] Panel 5 Islet Summary: (Ag6342) The expression of this gene was downregulated in mid-differentiated and differentiated adipose cells. Therapeutic modulation of this gene, expressed protein and/or use of antibodies or small molecule drugs targeting the gene or gene product will be useful in the treatment of obesity. Pursuant to our invention, this data shows for the first time, that this receptor subtype is expressed in human islet cells (Bayer patient 1).

### EXAMPLE F5

### Assays Screening for Modulators of Adenosine A1 Receptor

[0585] Adenosine A1 receptor activation mediates the inhibition of cAMP formation through Gᵢ protein signalling. This is relevant for insulin secretion because an increase in intracellular cAMP potentiates insulin secretion. Type 2 diabetes is caused by too little insulin secretion. Therefore, an antagonist of Adora1 will act to increase insulin secretion and the antagonist would be suitable in treatment of Type 2 diabetes.

[0586] Although the disclosed sequences of Adenosine A1 receptor are the preferred isoforms, any of the other isoforms may be used for similar purposes. Furthermore, under varying assay conditions, conditions may dictate that another isoform may supplant the listed isoforms. The CG58655-01 gene described herein, encoding the human Adenosine A1 receptor, represents a full-length physical clone and may be used directly for expression and screening purposes.

[0587] Assays for screening for modulators of human Adora1 can be formulated utilizing the non-exhaustive list of cell lines that express Adora1 from the RTQ-PCR results shown herein.

[0588] Adenosine A1 receptor activation mediates the inhibition of adenylyl cyclase and cAMP formation through Gᵢ protein signalling. To assay the inhibition of adenosine A1 receptor, the measurement of intracellular cAMP can be utilized. Cyclic AMP measurements can be made using the Biotrak cAMP assay system (Amersham Biosciences, Piscataway, N.J., USA). (Harndahl L, Jing X J, Ivarsson R, Degerman E, Ahren B, Manganiello V C, Renstrom E, Holst L S. Important role of phosphodiesterase 3B for the stimulatory action of cAMP on pancreatic beta-cell exocytosis and release of insulin. J Biol. Chem. 2002 Oct. 4; 277 (40):37446-55. PMID: 12169692). An increase in cAMP would be indicative of a positive screen. To evaluate the efficacy of the compound(s) thus identified, the effect on glucose-stimulated insulin secretion can be assayed in vitro with dispersed rat islets as used herein, or can be assayed in vivo by the effects on blood glucose in known rodent models of Type 2 diabetes.

[0589] Our results indicate that a modulator of Adora1 activity, such as an inhibitor, activator, antagonist, or agonist of Adora1 may be useful for treatment of such disorders as obesity, diabetes, and insulin resistance, as well as for enhancement of insulin secretion.

G. NOV7—3-Hydroxy-3-Methylglutaryl Co enzyme A Lyase (HMG-CoA Lyase or HMG-CoA or HL)

[0590] 3-Hydroxy-3-Methylglutaryl Coenzyme A Lyase catalyzes the final step of ketogenesis, an important pathway of mammalian energy metabolism. HMG-CoA Lyase deficiency known as hydroxymethylglutaricaciduria is an autosomal recessive inborn error in man leading to episodes of hypoglycemia and coma.

[0591] HMG-CoA Lyase has the following catalytic activity:
(s)-3-hydroxy-3-methylglutaryl-CoA=acetyl-CoA+acetoacetate

[0592] HMG-CoA affects biochemical pathways relevant to the etiology and pathogenesis of obesity and/or diabetes. The scheme incorporates the unique findings of these discovery studies in conjunction with what has been reported in the literature. The outcome of inhibiting the action of the human HMG CoA lyase would be a reduction of Insulin Resistance, a major problem in obesity and/or diabetes. HMG-CoA lyase uses HMG-CoA as a substrate to produce acetoacetate and acetyl-CoA. This is the final step in ketogenesis and leucine metabolism. Importantly, acetyl-CoA from this reaction can be fed back into the TCA cycle but also into lipogenic pathways.

[0593] We discovered that Mitochondrial 3-Hydroxy-3methylglutaryl coenzyme A lyase (mHMG-CoA lyase) is upregulated in the liver of SHR and WKY rats after triglitazone treatment. mHMG-CoA lyase is the final step in ketogenesis and leucine catabolism which has 3-hydroxy-methylglutaryl-CoA as its substrate, and produces acetoacetate (ketone body) and acetyl-CoA. This process takes place in the liver especially during weight loss and the amount of acetyl-CoA produced during both fatty acid oxidation and ketogenesis often exceeds the capacity of the TCA cycle. Moreover, excess citrate shunts acetyl-CoA back into the cytoplasm where it is used for cholesterol and fatty acid biosynthesis. Therefore, inhibiting this enzyme during weight loss may slow down ketone body formation and the generation of acetyl-CoA, and thus prevent the saturation of the TCA cycle.

[0594] The above formula summarizes the biochemistry surrounding the human HMG-CoA Lyase and potential assays that may be used to screen for antibody therapeutics or small molecule drugs to treat obesity and/or diabetes. Cell lines expressing the HMG-CoA Lyase can be obtained from the RTQ-PCR results shown herein. These and other HMG-CoA Lyase expressing cell lines could be used for screening purposes.

[0595] Furthermore, our results indicate that a modulator of HMG CoA Lyase activity, such as an inhibitor, activator, antagonist, or agonist of HMG CoA Lyase may be useful for treatment of such disorders as obesity, diabetes, and insulin resistance, as well as for enhancement of insulin secretion.

Discovery Process

[0596] The following sections describe the study design(s) and the techniques used to identify the HMG-CoA Lyase—encoded protein and any variants, thereof, as being suitable as diagnostic markers, targets for an antibody therapeutic and targets for a small molecule drugs for Obesity and Diabetes.

### EXAMPLE G1

### Insulin Resistance Study

[0597] A protocol Insulin Resistance study is disclosed in Example Q5.

[0598] The spontaneously hypertensive rat (SHR) is a strain exhibiting features of the human Metabolic Syndrome X. The phenotypic features include obesity, hyperglycemia, hypertension, dyslipidemia and dysfibrinolysis. Tissues were removed from adult male rats and a control strain (Wistar-Kyoto) to identify the gene expression differences that underlie the pathologic state in the SHR and in animals treated with various anti-hyperglycemic agents such as troglitizone. Tissues included sub-cutaneous adipose, visceral adipose and liver.

[0599] A gene fragment of the rat HMG-COA LYASE was initially found to be upregulated by 1.6 fold in the liver of WKY rats treated with Troglitazone LD10 relative to WKY rats treated with 0.02% DMSO as control using CuraGen's GeneCalling® method of differential gene expression. A differentially expressed rat gene fragment migrating at approximately 426.4 nucleotides in length was definitively identified as a component of the rat HMG CoA Lyase cDNA in the Troglitazone treated and the untreated WKY control rats. The method of competitive PCR was used for confirmation of the gene assessment. The chromatographic peaks corresponding to the gene fragment of the rat HMG CoA Lyase were ablated when a gene-specific primer (shown in Table G1) competes with primers in the linker-adaptors during the PCR amplification. The peaks at 426.4 nt in length were ablated in the sample from both the Troglitazone treated and the untreated WKY control rats. The altered expression of these genes in the animal model support the role of HMG CoA Lyase in the pathogenesis of obesity and/or diabetes.

TABLE G1
The sequence of the 427 nucleotide-long gene fragment and the gene-specific
primers used for competitive PCR are indicated on the cDNA sequence of the
rat HMG CoA Lyase fragment (SEQ ID NO:213) and are shown below in bold.
The gene-specific primers at the 5′ and 3′ ends of the fragment are
underlined.
Gene Sequence identified in WKY Troglitazone LD10 vs. 0.02% DMSO (Identified
fragment from 612 to 1038 in bold. band size: 427)

GGCCCCCGAG ATGGTCTGCA GAATGAAAAG AGTATCGTGC CGACGCCAGT GAAAATCAAA CTGATAGACA
TGCTATCCGA AGCAGGGCTC CCGGTCATCG AGOCCACCAG CTTTGTCTCT CCCAAGTGGG TGCCGCAGAT
GGCTGACCAC TCTGACGTCT TGAAGGGCAT TCAGAAGTTT CCCGGCATCA ACTACCCGGT CCTGACACCA
AACATGAAAG GCTTTGAGGA AGCGGTAGCT GCAGGTGCCA AGGAAGTGAG CATCTTTGGG GCTGCGTCCG
AGCTCTTCAC CCGGAAGAAT GTGAACTGCT CTATAGAGGA GAGTTTCCAG CGCTTTGATG GGGTCATGCA
GGCCGCGAGG GCTGCCAGCA TCTCTGTGAG AGGGTATGTC TCCTGTGCCC TCGGATGTCC CTACGACGGG
AAGGTCTCCC CGGCTAAAGT TGCTGAGGTC GCCAAGAAGT TGTACTCAAT GGGCTGCTAT GAGATGTCCC
TTGGGGACAC CATTGGCGTA GGCACGCCAG GACTCATGAA AGACATGCTG ACTGCTGTCC TGCATGAAGT
GCCTGTGGCC GCATTGGCTG TCCACTGCCA TGACACCTAT GGCCAAGCTC TGGCCAACAC GTTGGTGGCC
CTGCAGATGG GAGTGAGCGT TGTGGACTCC TCGGTGGCAG GACTCGGAGG CTGTCCCTAT GCAAAGGGGG
CGTCAGGAAA CTTGGCTACC GAGGACCTGG TCTACATGCT GACTGGCTTA GGGATTCACA CGGGTGTGAA
CCTCCAGAAG CTCCTAGAAG CCGGGGACTT CATCTGTCAA GCCCTGAACA GAAAAACCAG TTCCAAAGTG
GCACAGGCCA CCTGCAAACT CTGAGCCCCT TGTTCACGTA AACCGGAACT GTGGGAGTTG GGTGTACACA
ATGATTCCTG GATGGGGAAA TGGAATGAAG GCAAATGAGC CGGCCTCACA GAGGTCCCTC TCCTACATAG
AAGGGCTAGA GCTGCCAGCA CGCCCGGACC AGCTCCCCAG AGCTGCGTGC CTAAGCACTG CTTGGCTGGC
CCTGGGTGAG TCCACTAGCC AGCAGAGCTG ACATCCATGT GCCACGACCG CGGGTCCCAT GTTCTACCTC
TGAGGACAGC AGCGCCTTTG CTGAAATGGT GGGCTCAATC TACTGCGGTG GCCGACTGCC AACTCCAGCG
TCTCTGGGAA ATCTCTGTAC GTGATTCTTG AAAACAGCTT ATGTAATTAA AGGTTTAATT TTCTAATATC

[0600] Additionally, a gene fragment of the rat HMG CoA Lyase was initially found to be upregulated by 2.6 fold in the liver of SHR rats treated with Troglitazone LD10 relative to SHR rats treated with 0.02% DMSO as control using CuraGen's GeneCalling® method of differential gene expression. A differentially expressed rat gene fragment migrating at approximately 48.2 nucleotides in length was definitively identified as a component of the rat HMG CoA Lyase cDNA in the Troglitazone treated and the untreated SHR control rats. The method of competitive PCR was used for confirmation of the gene assessment. The chromatographic peaks corresponding to the gene fragment of the rat HMG CoA Lyase were ablated when a gene-specific primer (shown in Table G2) competes with primers in the linker-adaptors during the PCR amplification. The peaks at 48.2 nt in length were ablated in the sample from both the Troglitazone treated and the untreated WKY control rats. The altered expression of these genes in the animal model support the role of HMG CoA Lyase in the pathogenesis of obesity and/or diabetes.

TABLE G2
The sequence of the 48 nucleotide-long gene fragment and the gene-specific
primers used for competitive PCR are indicated on the cDNA sequence of the rat
HMG CoA Lyase fragment (SEQ ID NO:214) and are shown below in bold.
The gene-specific primers at the 5′ and 3′ ends of the fragment are underlined.
Gene Sequence identified in SHR Troglitazone LD10 vs. 0.02% DMSO (Identified
fragment from 612 to 659 in bold. band size: 48)

GGCCCCCGAGATGGTCTGCAGAATGAAAAGAGTATCGTGCCGACGCCAGTGAAAATCAAACTGATAGACATGCTATCCGA
AGCAGGGCTCCCGGTCATCGAGGCCACCAGCTTTGTCTCTCCCAAGTGGGTGCCGCAGATGGCTGACCACTCTGACGTCT
TGAAGGGCATTCAGAAGTTTCCCGGCATCAACTACCCGGTCCTGACACCAAACATGAAAGGCTTTGAGGAAGCGGTAGCT
GCAGGTGCCAAGGAAGTGAGCATCTTTGGGGCTGCGTCCGAGCTCTTCACCCGGAAGAATGTGAACTGCTCTATAGAGGA
GAGTTTCCAGCGCTTTGATGGGGTCATGCAGGCCGCGAGGGCTGCCAGCATCTCTGTGAGAGGGTATGTCTCCTGTGCCC
TCGGATCTCCCTACGAGGGGAAGGTCTCCCCGGCTAAAGTTGCTGAGGTCGCCAAGAAGTTGTACTCAATGGGCTGCTAT
GAGATCTCCCTTGGGGACACCATTGGCGTAGGCACGCCAGGACTCATGAAAGACATGCTGACTGCTGTCCTGCATGAAGT
GCCTGTGGCCGCATTGGCTGTCCACTGCCATGACACCTATGGCCAAGCTCTGGCCAACACGTTGGTGGCCCTGCAGATGG
GAGTGAGCGTTGTGGACTCCTCGGTGGCAGGACTCGGAGGCTGTCCCTATGCAAAGGGGGCGTCAGGAAACTTGGCTACC
GAGGACCTGGTCTACATCCTCACTGGCTTAGGGATTCACACGGGTGTGAACCTCCAGAAGCTCCTAGAAGCCGGGGACTT
CATCTGTCAAGCCCTGAACAGAAAAACCAGTTCCAAAGTGGCACAGGCCACCTGCAAACTCTGAGCCCCTTGTTCACCTA
AACCGGAACTGTGGGAGTTGGGTGTACACAATGATTCCTGGATGGGGAAATGGAATGAAGGCAAATGAGCCGGCCTCACA
GAGGTCCCTCTCCTACATAGAAGGGCTAGAGCTGCCAGCACGCCCGGAC

### EXAMPLE G2

### Identification of Human HMG CoA Lyase Sequence

[0601] The sequence of Human HMG CoA Lyase (Acc. No CG96859-03) was derived by laboratory screening of cDNA library by the two-hybrid approach. cDNA fragments covering either the full length of the DNA sequence, or part of the sequence, or both, were sequenced. In silico prediction was based on sequences available in CuraGen Corporation's proprietary sequence databases or in the public human sequence databases, and provided either the full-length DNA sequence, or some portion thereof. The protocol for identification of human sequence(s) is disclosed in Example Q8.

[0602] Table G3 shows an alignment (ClustalW) of the protein sequences of CG96859-03 (SEQ ID NO:60), another public form of HMG CoA lyase with one aa difference (P35914; SEQ ID NO:215), a novel splice form of HMG CoA lyase (CG96859-O₂; SEQ ID NO:66), and the mouse (S65036.1; SEQ ID NO:216) and rat (Y10054; SEQ ID NO:217) orthologues of HMG CoA Lyase. Table G4 shoes protein sequences of the public form of HMG CoA lyase (P35914; SEQ ID NO:215), the mouse (S65036.1; SEQ ID NO:216), and rat (Y10054; SEQ ID NO:217) orthologues of HMG CoA Lyase.

[image]

TABLE G4
Protein sequences of the public form of HMG CoA lyase (P35914; SEQ ID NO:
215), the mouse (S65036.1; SEQ ID NO:216), and rat (Y10054; SEQ ID NO:217)
orthologues of HMG CoA Lyase.

(SEQ ID NO:215)

>p35914_HMG_CoA_lyase
MAAMRKALPRRLVGLASLRAVSTSSMGTLPKRVKIVEVGPRDGLQNEKNIVSTPVKIKLIDMLSEAGLSV
IETTSFVSPKWVPQMGDHTEVLKGIQKFPGINYPVLTPNLKGFEAAVAAGAKEVVIFGAASELFTKKNIN
CSIEESFQRFDAILKAAQSANISVRGYVSCALGCPYEGKISPAKVAEVTKKFYSMGCYEISLGDTIGVGT
PGIMKDMLSAVMQEVPLAALAVHCHDTYGQALANTLMALQMGVSVVDSSVAGLGGCPYAQGASGNLATED
LVYMLEGLGIHTGVNLQKLLEAGNFICQALNRKTSSKVAQATCKL

(SEQ ID NO:216)

>S65036.1_mouse_HMG_lyase
MASVRKAFPRRLVGLTSLRAVSTSSMGTLPKQVKIVEVGPRDGLQNEKSIVPTPVKIRLIDMLSEAGLPV
IEATSFVSPNWVPQMADHSDVLKGIQKFPGINYPVLTPNMKGFEEAVAAGAKEVSVFGAVSELFTRKNAN
CSIEESFQRFAGVMQAAQAASISVRGYVSCALGCPYEGKVSPAKVAEVAKKLYSMGCYEISLGDTIGVGT
PGLMKDMLTAVMHEVPVTALGVHCHDTIGQALANTLVALQMGVSVVDSSVAGLGGCPYAKGASGNLATED
LVYMLNGLGIHTGVNLQKLLEAGDFICQALNRKTSSKVAQATCKL

(SEQ ID NO:217)

>y10054_HMG_CoA_lyase_rat
RLRAKMATVRKAFPQRLVGLASLRAASTSSMGTLPKRVKIVEVGPRDGLQNEKSIVPTPVKIKLIDMLSEAGLPV
IEATSFVSPKWVPQMADHSDVLKGIQKFPGINYPVLTPNMKGFEEAVMGAKEVSIFGAASELFTRKNVN
CSIEESFQRFDGVMQAARAASISVRGYVSCALGCPYEGKVSPAKVAEVAKKLYSMGCYEISLGDTIGVGT
PGLMKDMLTAVLHEVPVAALAVHCHDTYGQALANTLVALQMGVSVVDSSVAGLGGCPYAKGASGNLATED
LVYMLTGLGIHTGVNLQKLLEAGDFICQALNRKTSSKVAQATCKL

[0603] In addition to the human version of the HMG CoA Lyase identified as being differentially expressed in the experimental study, other variants have been identified by direct sequencing of cDNAs derived from many different human tissues and from sequences in public databases. Two splice-form variants have been identified at CuraGen. The two alternative spliced forms are CG96859-02 and CG96859-05. The preferred variant of all those identified, to be used for screening purposes, is CG96859-03.

[0604] The laboratory cloning was performed using one or more of the methods summarized in Example Q8. The NOV7 clone was analyzed, and the nucleotide and encoded polypeptide sequences are shown in Table G5.

TABLE G5
NOV7 Sequence Analysis

| | | |
|---|---|---|
| NOV7a, CG96859-03 | SEQ ID NO:59 | 1041 bp |
| DNA Sequence | ORF Start: ATG at 15 | ORF Stop: TGA at 990 |

AAATTCCGGCCAAGATGGCAGCAATGAGGAAGGCGCTTCCGCGGCGACTGGTGGGCTTGGCGTCCCTC
CGGGCTGTCAGCACCTCATCTATGGGCACTTTACCAAAGCGGGTGAAAATTGTGGAAGTTGGTCCCCG
AGATGGACTACAAAATGAAAAGAATATCGTATCTACTCCAGTGAAAATCAAGCTGATAGACATGCTTT
CTGAAGCAGGACTCTCTGTTATAGAAACCACCAGCTTTGTGTCTCCTAAGTGGGTTCCCCAGATGGGT
GACCACACTGAAGTCTTGAAGGGCATTCAGAAGTTTCCTGGCATCAACTACCCAGTCCTGACCCCAAA
TTTGAAAGGCTTCGAGGCAGCGGTTGCTGCTGGAGCCAAGGAAGTAGTCATCTTTGGAGCTGCCTCAG
AGCTCTTCACCAAGAAGAACATCAATTGTTCCATAGAGGAGAGTTTTCAGAGGTTTGACGCAATCCTG
AAGGCAGCGCAGTCAGCCAATATTTCTGTGCGGGGGTACGTCTCCTGTGCTCTTGGCTGCCCTTATGA
AGGGAAGATCTCCCCAGCTAAAGTAGCTGAGGTCACCAAGAAGTTCTACTCAATGGGCTGCTACGAGA
TCTCCCTGGGGGACACCATTGGTGTGGGCACCCCAGGGATCATGAAAGACATGCTGTCTGCTGTCATG
CAGGAAGTGCCTCTGGCTGCCCTGGCTGTCCACTGCCATGACACCTATGGTCAAGCCCTGGCCAACAC
CTTGATGGCCCTGCAGATGGGAGTGAGTGTCGTGGACTCTTCTGTGGCAGGACTTGGAGGCTGTCCCT
ACGCACAGGGGGCATCAGGAAACTTGGCCACAGAAGACCTGGTCTACATGCTAGAGGGCTTGGGCATT
CACACGGGTGTGAATCTCCAGAAGCTTCTGGAAGCTGGAAACTTTATCTGTCAAGCCCTGAACAGAAA
AACTAGCTCCAAAGTGGCTCAGGCTACCTGTAAACTCTGAGCCCCTTGCCCACCTGAAGGCCTGGGGA
TGATGTGGAAATAAGGGGCAT

| | | | |
|---|---|---|---|
| NOV7a, CG96859-03 | | | |
| Protein Sequence | SEQ ID NO:60 | 325 aa | MW at 34359.8 kD |

MAAMRKALPRRLVGLASLRAVSTSSMGTLPKRVKIVEVGPRDGLQNEKNIVSTPVKIKLIDMLSEAGL
SVIETTSFVSPKWVPQMGDHTEVLKGIQKFPGINYPVLTPNLKGFEAAVAAGAKEVVIFGAASELFTK
KNINCSIEESFQRFDAILKAAQSANISVRGYVSCALGCPYEGKISPAKVAEVTKKFYSMGCYEISLGD
TIGVGTPGIMKDMLSAVMQEVPLAALAVHCHDTYGQALANTLMALQMGVSVVDSSVAGLGGCPYAQGA
SGNLATEDLVYMLEGLGIHTGVNLQKLLEAGNFICQALNRKTSSKVAQATCKL

| | | |
|---|---|---|
| NOV7b, 223317153 | SEQ ID NO:61 | 982 bp |
| DNA Sequence | ORF Start: at 64 | ORF Stop: TGA at 967 |

TAACTTTATTATTAAAAATTAAAGAGGTATATATTAATGTATCGATTAAATAAGGAGGAATAAACCAT
GGGCACTTTACCAAAGCGGGTGAAAATTGTGGAAGTTGGTCCCCGAGATGGACTACAAAATGAAAAGA
ATATCGTATCTACTCCAGTGAAAATCAAGCTGATAGACATGCTTTCTGAAGCAGGACTCTCTGTTATA
GAAACCACCAGCTTTGTGTCTCCTAAGTGGGTTCCCCAGATGGGTGACCACACTGAAGTCTTGAAGGG
CATTCAGAAGTTTCCTGGCATCAACTACCCAGTCCTGACCCCAAATTTGAAAGGCTTCGAGGCAGCGG
TTGCTGCTGGAGCCAAGGAAGTAGTCATCTTTGGAGCTGCCTCAGAGCTCTTCACCAAGAAGAACATC
AATTGTTCCATAGAGGAGAGTTTTCAGAGGTTTGACGCAATCCTGAAGGCAGCGCAGTCAGCCAATAT
TTCTGTGCGGGGGTACGTCTCCTGTGCTCTTGGCTGCCCTTATGAAGGGAAGATCTCCCCAGCTAAAG
TAGCTGAGGTCACCAAGAAGTTCTACTCAATGGGCTGCTACGAGATCTCCCTGGGGGACACCATTGGT
GTGGGCACCCCAGGGATCATGAAAGACATGCTGTCTGCTGTCATGCAGGAAGTGCCTCTGGCTGCCCT
GGCTGTCCACTGCCATGACACCTATGGTCAAGCCCTGGCCAACACCTTGATGGCCCTGCAGATGGGAG
TGAGTGTCGTGGACTCTTCTGTGGCAGGACTTGGAGGCTGTCCCTACGCACAGGGGGCATCAGGAAAC
TTGGCCACAGAAGACCTGGTCTACATGCTAGAGGGCTTGGGCATTCACACGGGTGTGAATCTCCAGAA
GCTTCTGGAAGCTGGAAACTTTATCTGTCAAGCCCTGAACAGAAAAACTAGCTCCAAAGTGGCTCAGG
CTACCTCTAAACTCTGATCTAGAACAAAAA

| | | | |
|---|---|---|---|
| NOV7b, 223317153 | | | |
| Protein Sequence | SEQ ID NO:62 | 301 aa | MW at 31819.7 kD |

TMGTLPKRVKIVEVGPRDGLQNEKNIVSTPVKIKLIDMLSEAGLSVIETTSFVSPKWVPQMGDHTEVL
KGIQKFPGINYPVLTPNLKGFEAAVAAGAKEVVIFGAASELFTKKNINCSIEESFQRFDAILKAAQSA
NISVRGYVSCALGCPYEGKISPAKVAEVTKKFYSMGCYEISLGDTIGVGTPGIMKDMLSAVMQEVPLA
ALAVHCHDTYGQALANTLMALQMGVSVVDSSVAGLGGCPYAQGASGNLATEDLVYMLEGLGIHTGVNL
QKLLEAGNFICQALNRKTSSKVAQATSKL

| | | |
|---|---|---|
| NOV7c, CG96859-01 | SEQ ID NO:63 | 1568 bp |
| DNA Sequence | ORF Start: ATG at 15 | ORF Stop: TGA at 990 |

GAATTCCGGCCAAGATGGCAGCAATGAGGAAGGCGCTTCCGCGGCGACTGGTGGGCTTGGCGTCCCTC
CGGGCTGTCAGCACCTCATCTATGGGCACTTTACCAAAGCGGGTGAAAATTGTGGAAGTTGGTCCCCG
AGATGGACTACAAAATGAAAAGAATATCGTATCTACTCCAGTGAAAATCAAGCTGATAGACATGCTTT
CTGAAGCAGGACTCTCTGTTATAGAAACCACCAGCTTTGTGTCTCCTAAGTGGGTTCCCCAGATGGGT
GACCACACTGAAGTCTTGAAGGGCATTCAGAAGTTTCCTGGCATCAACTACCCAGTCCTGACCCCAAA
TTTGAAAGGCTTCGAGGCAGCGGTTGCTGCTGGAGCCAAGGAAGTAGTCATCTTTGGAGCTGCCTCAG
AGCTCTTCACCAAGAAGAACATCAATTGTTCCATAGAGGAGAGTTTTCAGAGGTTTGACGCAATCCTG
AAGGCAGCGCAGTCAGCCAATATTTCTGTGCGGGGGTACGTCTCCTGTGCTCTTGGCTGCCCTTATGA
AGGGAAGATCTCCCCAGCTAAAGTAGCTGAGGTCACCAAGAAGTTCTACTCAATGGGCTGCTACGAGA
TCTCCCTGGGGGACACCATTGGTGTGGGCACCCCAGGGATCATGAAAGACATGCTATCTGCTGTCATG
CAGGAAGTGCCTCTGGCTGCCCTGGCTGTCCACTGCCATGACACCTATGGTCAAGCCCTGACCAACAC
CTTGATGGCCCTGCAGATGGGAGTGAGTGTCGTGGACTCTTCTGTGGCAGGACTTGGAGGCTGTCCCT
ACGCACAGGGGGCATCAGGAAACTTGGCCACAGAAGACCTGGTCTACATGCTAGAGGGCTTGGGCATT
CACACGGGTGTGAATCTCCAGAAGCTTCTGGAAGCTGGAAACTTTATCTGTCAAGCCCTGAACAGAAA
AACTAGCTCCAAAGTGGCTCAGGCTACCTGTAAACTCTGAGCCCCTTGCCCACCTGAAGCCCTGGGGA
TGATGTGGAAATAGGGGCACACACAGATGATTCATGGATGGGGACATGGAAATGAGAATAGGTTAAAT
GGTGCAGGTACCTCATAGCCAGCTCTACACAGAGGTCTCTCCTGGCAGAAAGCAGGCGAAGGGCAGGA
GGAGCTGCTTGGCAGAAGGACCTCCTGCCCAGACCTGAGGAGTGAGAGGCTTTGAGGGCTGAAGTCTC
CCTTTGTTACGGACCCTGGCCCAGGAGTTGAATGCCTGAGGACGTGTGGGAACCCCGTTCCCTACTTA
GCATGATCCTTGAGTCTCCTCTCTGGATGGAATCCGCGAGCTGGCCACCTGGCCACCCTCTACACGGC
TCCACCCTGCCATGGCCGTGGGGCCCTTGCTCTCTGACTTCTCAGGACACAGGTCATGGAGGTTCTTC
CCAAGCTGGCAGAGGCCATTTGTGGAAAGTGGAGAGCTACGTGGTGGCCGTCTGCCAACTCCAGCATC
TCTGGAAAATCTCCACGCTGAATGTGATTTTTGAAAACAGCTTATGTAATTAAAGGTTGAATGGCACA
TCAT

| | | | |
|---|---|---|---|
| NOV7c, CG96859-01 | | | |
| Protein Sequence | SEQ ID NO:64 | 325 aa | MW at 34389.8 kD |

MAAMRKALPRRLVGLASLRAVSTSSMGTLPKRVKIVEVGPRDGLQNEKNIVSTPVKIKLIDMLSEAGL
SVIETTSFVSPKWVPQMGDHTEVLKGIQKFPGINYPVLTPNLKGFEAAVAAGAKEVVIFGAASELFTK
KNINCSIEESFQRFDAILKAAQSANISVRGYVSCALGCPYEGKISPAKVAEVTKKFYSMGCYEISLGD
TIGVGTPGIMKDMLSAVMQEVPLAALAVHCHDTYGQALTNTLMALQMGVSVVDSSVAGLGGCPYAQGA
SGNLATEDLVYMLEGLGIHTGVNLQKLLEAGNFICQALNRKTSSKVAQATCKL

| | | |
|---|---|---|
| NOV7d, CG96859-02 | SEQ ID NO:65 | 1355 bp |
| DNA Sequence | ORF Start: ATG at 15 | ORE Stop: TGA at 777 |

GAATTCCGGCCAAGATGGCAGCAATGAGGAAGGCGCTTCCGCGGCGACTGGTGGGCTTGGCGTCCCTC
CGGGCTGTCAGCACCTCATCTATGGGCACTTTACCAAAGCGGGTGAAAATTGTGGAAGTTGGTCCCCG
AGATGGACTACAAAATGAAAAGAATATCGTATCTACTCCAGTGAAAATCAAGCTGATAGACATGCTTT
CTGAAGCAGGACTCTCTGTTATAGAAACCACCAGCTTTGTGTCTCCTAAGTGGGTTCCCCAGATGGGT
GACCACACTGAAGTCTTGAAGGGCATTCAGAAGTTTCCTGGCATCAACTACCCAGTCCTGACCCCAAA
TTTGAAAGGCTTCGAGGCAGCGGTCACCAAGAAGTTCTACTCAATGGGCTGCTACGAGATCTCCCTGG
GGGACACCATTGGTGTGGGCACCCCAGGGATCATGAAAGACATGCTGTCTGCTGTCATGCAGGAAGTG
CCTCTGGCTGCCCTGGCTGTCCACTGCCATGACACCTATGGTCAAGCCCTGGCCAACACCTTGATGGC
CCTGCAGATGGGAGTGAGTGTCGTGGACTCTTCTGTGGCAGGACTTGGAGGCTGTCCCTACGCACAGG
GGGCATCAGGAAACTTGGCCACAGAAGACCTGGTCTACATGCTAGAGGGCTTGGGCATTCACACGGGT
GTGAATCTCCAGAAGCTTCTGGAAGCTGGAAACTTTATCTGTCAAGCCCTGAACAGAAAAACTAGCTC
CAAAGTGGCTCAGGCTACCTGTAAACTCTGAGCCCCTTGCCCACCTGAAGCCCTGGGGATGATGTGGA
AATAGGGGCACACACAGATGATTCATGGATGGGGACATGGAAATGAGAATAGGTTAAATGGTGCAGGT
ACCTCATAGCCAGCTCTACACAGAGGTCTCTCCTGGCAGAAAGCAGGCGAAGGGCAGGAGGAGCTGCT
TGGCAGAAGGACCTCCTGCCCAGACCTGAGGAGTGAGAGGCTTTGAGGGCTGAAGTCTCCCTTTGTTA
CGGACCCTGGCCCAGGAGTTGAATGCCTGAGGACGTGTGGGAACCCCGTTCCCTACTTAGCATGATCC
TTGAGTCTCCTCTCTGGATGGAATCCGCGAGCTGGCCACCTGGCCACCCTCTACACGGCTCCACCCTG
CCATGGCCGTGGGGCCCTTGCTCTCTGACTTCTCAGGACACAGGTCATGGAGGTTCTTCCCAAGCTGG
CAGAGGCCATTTGTGGAAAGTGGAGAGCTACGTGGTGGCCGTCTGCCAACTCCAGCATCTCTGGAAAA
TCTCCACGCTGAATGTGATTTTTGAAAACAGCTTATGTAATTAAAGGTTGAATGGCACATCAT

| | | | |
|---|---|---|---|
| NOV7d, CG96859-02 | | | |
| Protein Sequence | SEQ ID NO:66 | 254 aa | MW at 26909.3 kD |

MAAMRKALPRRLVGLASLRAVSTSSMGTLPKRVKIVEVGPRDGLQNEKNIVSTPVKIKLIDMLSEAGL
SVIETTSFVSPKWVPQMGDHTEVLKGIQKFPGINYPVLTPNLKGFEAAVTKKFYSMGCYEISLGDTIG
VGTPGIMKDMLSAVMQEVPLAALAVHCHDTYGQALANTLMALQMGVSVVDSSVAGLGGCPYAQGASGN
LATEDLVYMLEGLGIHTGVNLQKLLEAGNFICQALNRKTSSKVAQATCKL

| | | |
|---|---|---|
| NOV7e, CG96859-04 | SEQ ID NO:67 | 788 bp |
| DNA Sequence | ORF Start: ATG at 2 | ORF Stop: TGA at 764 |

GATGGCAGCAATGAGGAAGGCGCTTCCGCGGCGACTGGTGGGCTTGGCGTCCCTCCGGGCTGTCAGCA
CCTCATCTATGGGCACTTTACCAAAGCGGGTGAAAATTGTGGAAGTTGGTCCCCGAGATGGACTACAA
AATGAAAGGAATATCGTATCTACTCCAGTGAAAATCAAGCTGATAGACATGCTTTCTGAAGCAGGACT
CTCTGTTATAGAAACCACCAGCTTTGTGTCTCCTAAGTGGGTTCCCCAGATGGGTGACCACACTGAAG
TCTTGAAGGGCATTCAGAAGTTTCCTGGCATCAACTACCCAGTCCTGACCCCAAATTTGAAAGGCTTC
GAGGCAGCGGTCACCAAGAAGTTCTACTCAATGGGCTGCTACGAGATCTCCCTGGGGGACACCATTGG
TGTGGGCACCCCAGGGATCATGAAAGACATGCTGTCTGCTGTCATGCAGGAAGTGCCTCTGGCTGCCC
TGGCTGTCCACTGCCATGACACCTATGGTCAAGCCCTGGCCAACACCTTGATGGCCCTGCAGATGGGA
GTGAGTGTCGTGGACTCTTCTGTGGCAGGACTTGGAGGCTGTCCCTACGCACAGGGGGCATCAGGAAA
CTTGGCCACAGAAGACCTGGTCTACATGCTAGAGGGCTTGGGCATTCACACGGGTGTGAATCTCCAGA
AGCTTCTGGAAGCTGGAAACTTTATCTGTCAAGCCCTGAACAGAAAAACTAGCTCCAAAGTGGCTCAG
GCTACCTGTAAACTCTGAGCCCCTTGCCCACCTGAAGCCC

| | | | |
|---|---|---|---|
| NOV7e, CG96859-04 | | | |
| Protein Sequence | SEQ ID NO:68 | 254 aa | MW at 26937.3 kD |

MAAMRKALPRRLVGLASLRAVSTSSMGTLPKRVKIVEVGPRDGLQNERNIVSTPVKIKLIDMLSEAGL
SVIETTSFVSPKWVPQMGDHTEVLKGIQKFPGINYPVLTPNLKGFEAAVTKKFYSMGCYEISLGDTIG
VGTPGIMKDMLSAVMQEVPLAALAVHCHDTYGQALANTLMALQMGVSVVDSSVAGLGGCPYAQGASGN
LATEDLVYMLEGLGIHTGVNLQKLLEAGNFICQALNRKTSSKVAQATCKL

| | | |
|---|---|---|
| NOV7f, CG96859-05 | SEQ ID NO:69 | 893 bp |
| DNA Sequence | ORF Start: ATG at 2 | ORF Stop: TGA at 869 |

GATGGCAGCAATGAGGAAGGCGCTTCCGCGGCGACTGGTGGGCTTGGCGTCCCTCCGGGCTGTCAGCA
CCTTATCTATGGGCACTTTACCAAAGCGGGTGAAAATTGTGGAAGTTGGTCCCCGAGATGGACTACAA
AATGAAAAGAATATCGTATCTACTCCAGTGAAAATCAAGCTGATAGACATGCTTTCTGAAGCAGGACT
CTCTGTTATAGAAACCACCAGCTTTGTGTCTCCTAAGTGGGTTCCCCAGATGGGTGACCACACTGAAG
TCTTGAAGGGCATTCAGAAGTTTCCTGGCATCAACTACCCAGTCCTGACCCCAAATTTGAAAGGCTTC
GAGGCAGCGGTTGCTGCTGGAGCCAAGGAAGTAGTCATCTTTGGAGCTGCCTCAGAGCTCTTCACCAA
GAAGAACATCAATTGTTCCATAGAGGAGAGTTTTCAGAGGTTTGACGCAATCCTGAAGGCAGCGCAGT
CAGCCAATATTTCTGTGCGGGGGTACGTCTCCTGTGCTCTTGGCTGCCCTTATGAAGGGAAGATCTCC
CCAGCTAAAGTAGCTGAGGAAGTGCCTCTGGCTGCCCTGGCTGTCCACTGCCATGACACCTATGGTCA
AGCCCTGGCCAACACCTTGATGGCCCTGCAGATGGGAGTGAGTGTCGTGGACTCTTCTGTGGCAGGAC
TTGGAGGCTGTCCCTACGCACAGGGGGCATCAGGAAACTTGGCCACAGAAGACCTGGTCTACATGCTA
GAGGGCTTGGGCATTCACACGGGTGTGAATCTCCAGAAGCTTCTGGAAGCTGGAAACTTTATCTGTCA
AGCCCTGAACAGAAAAACTAGCTCCAAAGTGGCTCAGGCTACCTGTAAACTCTGAGCCCCTTGCCCAC
CTGAAGCCC

| | | | |
|---|---|---|---|
| NOV7f, CG96859-05 | | | |
| Protein Sequence | SEQ ID NO:70 | 289 aa | MW at 30531.3 kD |

MAAMRKALPRRLVGLASLRAVSTLSMGTLPKRVKIVEVGPRDGLQNEKNIVSTPVKIKLIDMLSEAGL
SVIETTSFVSPKWVPQMGDHTEVLKGIQKFPGINYPVLTPNLKGFEAAVAAGAKEVVIFGAASELFTK
KNINCSIEESFQRFDAILKAAQSANISVRGYVSCALGCPYEGKISPAKVAEEVPLAALAVHCHDTYGQ
ALANTLMALQMGVSVVDSSVAGLGGCPYAQGASGNLATEDLVYMLEGLGIHTGVNLQKLLEAGNFICQ
ALNRKTSSKVAQATCKL

| | | |
|---|---|---|
| NOV7g, CG96859-06 | SEQ ID NO:71 | 1353 bp |
| DNA Sequence | ORF Start: ATG at 202 | ORF Stop: at 1171 |

CCCCAAAATTCGTAACAACTCCGCCCCATTGACGCAAATGGGCGGTAGGCGTGTACGGTGGGAGGTCT
ATATAAGCAGAGCTCTCTGGCTAACTAGAGAACCCACTGCTTACTGGCTTATCGAAATTAATACGACT
CACTATAGGGAGACCCAAGCTGGCTAGCGTTTAAACTTAAGCTTGGTACCGAGCTCGGATCCACCATG
GCAGCAATGAGGAAGGCGCTTCCGCGGCGACTGGTGGGCTTGGCGTCCCTCCGGGCTGTCAGCACCTC
ATCTATGGGCACTTTACCAAAGCGGGTGAAAATTGTGGAAGTTGGTCCCCGAGATGGACTACAAAATG
AAAAGAATATCGTATCTACTCCAGTGAAAATCAAGCTGATAGACATGCTTTCTGAAGCAGGACTCTCT
GTTATAGAAACCACCAGCTTTGTGTCTCCTAAGTGGGTTCCCCAGATGGGTGACCACACTGAAGTCTT
GAAGGGCATTCAGAAGTTTCCTGGCATCAACTACCCAGTCCTGACCCCAAATTTGAAAGGCTTCGAGG
CAGCGGTTGCTGCTGGAGCCAAGGAAGTAGTCATCTTTGGAGCTGCCTCAGAGCTCTTCACCAAGAAG
AACATCAATTGTTCCATAGAGGAGAGTTTTCAGAGGTTTGACGCAATCCTGAAGGCAGCGCAGTCAGC
CAATATTTCTGTGCGGGGGTACGTCTCCTGTGCTCTTGGCTGCCCTTATGAAGGGAAGATCTCCCCAG
CTAAAGTAGCTGAGGTCACCAAGAAGTTCTACTCAATGGGCTGCTACGAGATCTCCCTGGGGGACACC
ATTGGTGTGGGCACCCCAGGGATCATGAAAGACATGCTGTCTGCTGTCATGCAGGAAGTGCCTCTGGC
TGCCCTGGCTGTCCACTGCCATGACACCTATGGTCAAGCCCTGGCCAACACCTTGATGGCCCTGCAGA
TGGGAGTGAGTGTCGTGGACTCTTCTGTGGCAGGACTTGGAGGCTGTCCCTACGCACAGGGGGCATCA
GGAAACTTGGCCACAGAAGACCTGGTCTACATGCTAGAGGGCTTGGGCATTCACACGGGTGTGAATCT
CCAGAAGCTTCTGGAAGCTGGAAACTTTATCTGTCAAGCCCTGAACAGAAAAACTAGCTCCAAAGTGG
CTCAGGCTACCTGTAAACTCTGAGCGGCCGCTCGAGTCTAGAGGGCCCGTTTAAACCCGCTGATCAGC
CTCGACTGTGCCTTCTAGTTGCCAGCCATCTGTTGTTTGCCCCTCCCCCGTGCCTTCCTTGACCCTGG
AAGGTGCCACTCCCACTGTCCTTTCCTAATAAAATGAGGAAATTGCATCGCATTGTCTGAG

| | | | |
|---|---|---|---|
| NOV7g, CG96859-06 | | | |
| Protein Sequence | SEQ ID NO:72 | 323 aa | MW at 34118.4 kD |

MAAMRKALPRRLVGLASLRAVSTSSMGTLPKRVKIVEVGPRDGLQNEKNIVSTPVKIKLIDMLSEAGL
SVIETTSFVSPKWVPQMGDHTEVLKGIQKFPGINYPVLTPNLKGFEAAVAAGAKEVVIFGAASELFTK
KNINCSIEESFQRFDAILKAAQSANISVRGYVSCALGCPYEGKISPAKVAEVTKKFYSMGCYEISLGD
TIGVGTPGIMKDMLSAVMQEVPLAALAVHCHDTYGQALANTLMALQMGVSVVDSSVAGLGGCPYAQGA
SGNLATEDLVYMLEGLGIHTGVNLQKLLEAGNFICQALNRKTSSKVAQATC

| | | |
|---|---|---|
| NOV7h, CG96859-07 | SEQ ID NO:73 | 1969 bp |
| DNA Sequence | ORF Start: at 64 | ORF Stop: TGA at 967 |

TAACTTTATTATTAAAAATTAAAGAGGTATATATTAATGTATCGATTAAATAAGGAGGAATAAACCAT
GGGCACTTTACCAAAGCGGGTGAAAATTGTGGAAGTTGGTCCCCGAGATGGACTACAAAATGAAAAGA
ATATCGTATCTACTCCAGTGAAAATCAAGCTGATAGACATGCTTTCTGAAGCAGGACTCTCTGTTATA
GAAACCACCAGCTTTGTGTCTCCTAAGTGGGTTCCCCAGATGGGTGACCACACTGAAGTCTTGAAGGG
CATTCAGAAGTTTCCTGGCATCAACTACCCAGTCCTGACCCCAAATTTGAAAGGCTTCGAGGCAGCGG
TTGCTGCTGGAGCCAAGGAAGTAGTCATCTTTGGAGCTGCCTCAGAGCTCTTCACCAAGAAGAACATC
AATTGTTCCATAGAGGAGAGTTTTCAGAGGTTTGACGCAATCCTGAAGGCAGCGCAGTCAGCCAATAT
TTCTGTGCGGGGGTACGTCTCCTGTGCTCTTGGCTGCCCTTATGAAGGGAAGATCTCCCCAGCTAAAG
TAGCTGAGGTCACCAAGAAGTTCTACTCAATGGGCTGCTACGAGATCTCCCTGGGGGACACCATTGGT
GTGGGCACCCCAGGGATCATGAAAGACATGCTGTCTGCTGTCATGCAGGAAGTGCCTCTGGCTGCCCT
GGCTGTCCACTGCCATGACACCTATGGTCAAGCCCTGGCCAACACCTTGATGGCCCTGCAGATGGGAG
TGAGTGTCGTGGACTCTTCTGTGGCAGGACTTGGAGGCTGTCCCTACGCACAGGGGGCATCAGGAAAC
TTGGCCACAGAAGACCTGGTCTACATGCTAGAGGGCTTGGGCATTCACACGGGTGTGAATCTCCAGAA
GCTTCTGGAAGCTGGAAACTTTATCTGTCAAGCCCTGAACAGAAAAACTAGCTCCAAAGTGGCTCAGG
CTACCTGTAAACTCTGA

| | | | |
|---|---|---|---|
| NOV7h, CG96859-07 | | | |
| Protein Sequence | SEQ ID NO:74 | 301 aa | MW at 31835.7 kD |

TMGTLPKRVKIVEVGPRDGLQNEKNIVSTPVKIKLIDMLSEAGLSVIETTSFVSPKWVPQMGDHTEVL
KGIQKFPGINYPVLTPNLKGFEAAVAAGAKEVVIFGAASELFTKKNINCSIEESFQRFDAILKAAQSA
NISVRGYVSCALGCPYEGKISPAKVAEVTKKFYSMGCYEISLGDTIGVGTPGIMKDMLSAVMQEVPLA
ALAVHCHDTYGQALANTLMALQMGVSVVDSSVAGLGGCPYAQGASGNLATEDLVYMLEGLGIHTGVNL
QKLLEAGNFICQALNRKTSSKVAQATCKL

| | | |
|---|---|---|
| NOV7i, GG96859-08 | SEQ ID NO:75 | 969 bp |
| DNA Sequence | ORF Start: at 64 | ORF Stop: TGA at 967 |

TAACTTTATTATTAAAAATTAAAGAGGTATATATTAATGTATCGATTAAATAAGGAGGAATAAACCAT
GGGCACTTTACCAAAGCGGGTGAAAATTGTGGAAGTTGGTCCCCGAGATGGACTACAAAATGAAAAGA
ATATCGTATCTACTCCAGTGAAAATCAAGCTGATAGACATGCTTTCTGAAGCAGGACTCTCTGTTATA
GAAACCACCAGCTTTGTGTCTCCTAAGTGGGTTCCCCAGATGGGTGACCACACTGAAGTCTTGAAGGG
CATTCAGAAGTTTCCTGGCATCAACTACCCAGTCCTGACCCCAAATTTGAAAGGCTTCGAGGCAGCGG
TTGCTGCTGGAGCCAAGGAAGTAGTCATCTTTGGAGCTGCCTCAGAGCTCTTCACCAAGAAGAACATC
AATTGTTCCATAGAGGAGAGTTTTCAGAGGTTTGACGCAATCCTGAAGGCAGCGCAGTCAGCCAATAT
TTCTGTGCGGGGGTACGTCTCCTGTGCTCTTGGCTGCCCTTATGAAGGGAAGATCTCCCCAGCTAAAG
TAGCTGAGGTCACCAAGAAGTTCTACTCAATGGGCTGCTACGAGATCTCCCTGGGGGACACCATTGGT
GTGGGCACCCCAGGGATCATGAAAGACATGCTGTCTGCTGTCATGCAGGAAGTGCCTCTGGCTGCCCT
GGCTGTCCACTGCCATGACACCTATGGTCAAGCCCTGGCCAACACCTTGATGGCCCTGCAGATGGGAG
TGAGTGTCGTGGACTCTTCTGTGGCAGGACTTGGAGGCTGTCCCTACGCACAGGGGGCATCAGGAAAC
TTGGCCACAGAAGACCTGGTCTACATGCTAGAGGGCTTGGGCATTCACACGGGTGTGAATCTCCAGAA
GCTTCTGGAAGCTGGAAACTTTATCTGTCAAGCCCTGAACAGAAAAACTAGCTCCAAAGTGGCTCAGG
CTACCTGTAAACTCTGA

| | | | | |
|---|---|---|---|---|
| NOV7i, CG96859-08 | | | | +TL,43 |
| Protein Sequence | SEQ ID NO:76 | 301 aa | MW at 31835.7 kD | |

TMGTLPKRVKIVEVGPRDGLQNEKNIVSTPVKIKLIDMLSEAGLSVIETTSFVSPKWVPQMGDHTEVL
KGIQKFPGINYPVLTPNLKGFEAAVAAGAKEVVIFGAASELFTKKNINCSIEESFQRFDAILKAAQSA
NISVRGYVSCALGCPYEGKISPAKVAEVTKKFYSMGCYEISLGDTIGVGTPGIMKDMLSAVNQEVPLA
ALAVHCHDTYGQALANTLMALQMGVSVVDSSVAGLGGCPYAQGASGNLATEDLVYMLEGLGIHTGVNL
QKLLEAGNFICQALNRKTSSKVAQATCKL

| | | |
|---|---|---|
| NOV7j, CG96859-09 | SEQ ID NO:77 | 987 bp |
| DNA Sequence | ORF Start: at 64 | ORF Stop: TGA at 985 |

TAACTTTATTATTAAAAATTAAAGAGGTATATATTAATGTATCGATTAAATAAGGAGGAATAAACCAT
GGGCCACCATCACCACCATCACACTTTACCAAAGCGGGTGAAAATTGTGGAAGTTGGTCCCCGAGATG
GACTACAAAATGAAAAGAATATCGTATCTACTCCAGTGAAAATCAAGCTGATAGACATGCTTTCTGAA
GCAGGACTCTCTGTTATAGAAACCACCAGCTTTGTGTCTCCTAAGTGGGTTCCCCAGATGGGTGACCA
CACTGAAGTCTTGAAGGGCATTCAGAAGTTTCCTGGCATCAACTACCCAGTCCTGACCCCAAATTTGA
AAGGCTTCGAGGCAGCGGTTGCTGCTGGAGCCAAGGAAGTAGTCATCTTTGGAGCTGCCTCAGAGCTC
TTCACCAAGAAGAACATCAATTGTTCCATAGAGGAGAGTTTTCAGAGGTTTGACGCAATCCTGAAGGC
AGCGCAGTCAGCCAATATTTCTGTGCGGGGGTACGTCTCCTGTGCTCTTGGCTGCCCTTATGAAGGGA
AGATCTCCCCAGCTAAAGTAGCTGAGGTCACCAAGAAGTTCTACTCAATGGGCTGCTACGAGATCTCC
CTGGGGGACACCATTGGTGTGGGCACCCCAGGGATCATGAAAGACATGCTGTCTGCTGTCATGCAGGA
AGTGCCTCTGGCTGCCCTGGCTGTCCACTGCCATGACACCTATGGTCAAGCCCTGGCCAACACCTTGA
TGGCCCTGCAGATGGGAGTGAGTGTCGTGGACTCTTCTGTGGCAGGACTTGGAGGCTGTCCCTACGCA
CAGGGGGCATCAGGAAACTTGGCCACAGAAGACCTGGTCTACATGCTAGAGGGCTTGGGCATTCACAC
GGGTGTGAATCTCCAGAAGCTTCTGGAAGCTGGAAACTTTATCTGTCAAGCCCTGAACAGAAAAACTA
GCTCCAAAGTGGCTCAGGCTACCTGTAAACTCTGA

| | | | |
|---|---|---|---|
| NOV7j, CG96859-09 | | | |
| Protein Sequence | SEQ ID NO:78 | 307 aa | MW at 32658.6 kD |

TMGHHHHHHTLPKRVKIVEVGPRDGLQNEKNIVSTPVKIKLIDMLSEAGLSVIETTSFVSPKWVPQMG
DHTEVLKGIQKFPGINYPVLTPNLKGFEAAVAAGAKEVVIFGAASELFTKKNINCSIEESFQRFDAIL
KAAQSANISVRGYVSCALGCPYEGKISPAKVAEVTKKFYSMGCYEISLGDTIGVGTPGIMKDMLSAVM
QEVPLAALAVHCHDTYGQALANTLMALQMGVSVVDSSVAGLGGCPYAQGASGNLATEDLVYMLEGLGI
HTGVNLQKLLEAGNFICQALNRKTSSKVAQATCKL

[0605] A ClustalW comparison of the above protein sequences yields the following sequence alignment shown in Table G6.

TABLE G6
Comparison of the NOV7 protein sequences.

| | |
|---|---|
| NOV7a | MAANRKALPRRLVGLASLRAVSTSSMGTLPKRVKIVEVGPRDGLQNEKNIVSTPVKIKLI |
| NOV7b | ————————————————————————TMGTLPKRVKIVEVGPRDGLQNEKNIVSTPVKIKLI |
| NOV7c | MAAMRKALPRRLVGLASLRAVSTSSMGTLPKRVKIVEVGPRDGLQNEKNIVSTPVKIKLI |
| NOV7d | MAAMRKALPRRLVGLASLRAVSTSSMGTLPKRVKIVEVGPRDGLQNEKNIVSTPVKIKLI |
| NOV7e | MAAMRKALPRRLVGLASLRAVSTSSMGTLPKRVKIVEVGPRDGLQNERNIVSTPVKIKLI |
| NOV7f | MAAMRKALPRRLVGLASLRAVSTLSMGTLPKRVKIVEVGPRDGLQNEKNIVSTPVKIKLI |
| NOV7g | MAAMRKALPRRLVGLASLRAVSTSSMGTLPKRVKIVEVGPRDGLQNEKNIVSTPVKIKLI |
| NOV7h | ————————————————————————TMGTLPKRVKIVEVGPRDGLQNEKNIVSTPVKIKLI |
| NOV7i | ————————————————————————TMGTLPKRVKIVEVGPRDGLQNEKNIVSTPVKIKLI |
| NOV7j | ——————————————————TMGHHHHHHTLPKRVKIVEVGPRDGLQNEKNIVSTPVKIKLI |
| NOV7a | DMLSEAGLSVIETTSFVSPKWVPQMGDHTEVLKGIQKFPGINYPVLTPNLKGFEAAVAAG |
| NOV7b | DMLSEAGLSVIETTSFVSPKWVPQMGDHTEVLKGIQKFPGINYPVLTPNLKGFEAAVAAG |
| NOV7c | DMLSEAGLSVIETTSFVSPKWVPQMGDHTEVLKGIQKFPGINYPVLTPNLKGFEAAVAAG |
| NOV7d | DMLSEAGLSVIETTSFVSPKWVPQMGDHTEVLKGIQKFPGINYPVLTPNLKGFEAAVTK— |
| NOV7e | DMLSEAGLSVIETTSFVSPKWVPQMGDHTEVLKGIQKFPGINYPVLTPNLKGFEAAVTK— |
| NOV7f | DMLSEAGLSVIETTSFVSPKWVPQMGDHTEVLKGIQKFPGINYPVLTPNLKGFEAAVAAG |
| NOV7g | DMLSEAGLSVIETTSFVSPKWVPQMGDHTEVLKGIQKFPGINYPVLTPNLKGFEAAVAAG |
| NOV7h | DMLSEAGLSVIETTSFVSPKWVPQMGDHTEVLKGIQKFPGINYPVLTPNLKGFEAAVAAG |
| NOV7i | DMLSEAGLSVIETTSFVSPKWVPQMGDHTEVLKGIQKFPGINYPVLTPNLKGFEAAVAAG |
| NOV7j | DMLSEAGLSVIETTSFVSPKWVPQMGDHTEVLKGIQKFPGINYPVLTPNLKGFEAAVAAG |
| NOV7a | AKEVVIFGAASELFTKKNINCSIEESFQRFDAILKAAQSANISVRGYVSCALGCPYEGKI |
| NOV7b | AKEVVIFGAASELFTKKNINCSIEESFQRFDAILKAAQSANISVRGYVSCALGCPYEGKI |
| NOV7c | AKEVVIFGAASELFTKKNINCSIEESFQRFDAILKAAQSANISVRGYVSCALGCPYEGKI |
| NOV7d | ———————————————————————————————————————————————————————————— |
| NOV7e | ———————————————————————————————————————————————————————————— |
| NOV7f | AKEVVIFGAASELFTKKNINCSIEESFQRFDAILKAAQSANISVRGYVSCALGCPYEGKI |
| NOV7g | AKEVVIFGAASELFTKKNINCSIEESFQRFDAILKAAQSANISVRGYVSCALGCPYEGKI |
| NOV7h | AKEVVIFGAASELFTKKNINCSIEESFQRFDAILKAAQSANISVRGYVSCALGCPYEGKI |
| NOV7i | AKEVVIFGAASELFTKKNINCSIEESFQRFDAILKAAQSANISVRGYVSCALGCPYEGKI |
| NOV7j | AKEVVIFGAASELFTKKNINCSIEESFQRFDAILKAAQSANISVRGYVSCALGCPYEGKI |
| NOV7a | SPAKVAEVTKKFYSMGCYEISLGDTIGVGTPGIMKDMLSAVMQEVPLAALAVHCHDTYGQ |
| NOV7b | SPAKVAEVTKKFYSMGCYEISLGDTIGVGTPGIMKDMLSAVMQEVPLAALAVHCHDTYGQ |
| NOV7c | SPAKVAEVTKKFYSMGCYEISLGDTIGVGTPGIMKDMLSAVMQEVPLAALAVHCHDTYGQ |
| NOV7d | ——————————KFYSMGCYEISLGDTIGVGTPGIMKDMLSAVMQEVPLAALAVHCHDTYGQ |
| NOV7e | ——————————KFYSMGCYEISLGDTIGVGTPGIMKDMLSAVMQEVPLAALAVHCHDTYGQ |
| NOV7f | SPAKVAE————————————————————————————————————EVPLAALAVHCHDTYGQ |
| NOV7g | SPAKVAEVTKKFYSMGCYEISLGDTIGVGTPGIMKDMLSAVMQEVPLAALAVHCHDTYGQ |
| NOV7h | SPAKVAEVTKKFYSMGCYEISLGDTIGVGTPGIMKDMLSAVMQEVPLAALAVHCHDTYGQ |
| NOV7i | SPAKVAEVTKKFYSMGCYEISLGDTIGVGTPGIMKDMLSAVMQEVPLAALAVHCHDTYGQ |
| NOV7j | SPAKVAEVTKKFYSMGCYEISLGDTIGVGTPGIMKDMLSAVMQEVPLAALAVHCHDTYGQ |
| NOV7a | ALANTLMALQMGVSVVDSSVAGLGGCPYAQGASGNLATEDLVYMLEGLGIHTGVNLQKLL |
| NOV7b | ALANTLMALQMGVSVVDSSVAGLGGCPYAQGASGNLATEDLVYMLEGLGIHTGVNLQKLL |
| NOV7c | ALTNTLMALQMGVSVVDSSVAGLGGCPYAQGASGNLATEDLVYMLEGLGIHTGVNLQKLL |
| NOV7d | ALANTLMALQMGVSVVDSSVAGLGGCPYAQGASGNLATEDLVYMLEGLGIHTGVNLQKLL |
| NOV7e | ALANTLMALQMGVSVVDSSVAGLGGCPYAQGASGNLATEDLVYMLEGLGIHTGVNLQKLL |
| NOV7f | ALANTLMALQMGVSVVDSSVAGLGGCPYAQGASGNLATEDLVYMLEGLGIHTGVNLQKLL |
| NOV7g | ALANTLMALQMGVSVVDSSVAGLGGCPYAQGASGNLATEDLVYMLEGLGIHTGVNLQKLL |
| NOV7h | ALANTLMALQMGVSVVDSSVAGLGGCPYAQGASGNLATEDLVYMLEGLGIHTGVNLQKLL |
| NOV7i | ALANTLMALQMGVSVVDSSVAGLGGCPYAQGASGNLATEDLVYMLEGLGIHTGVNLQKLL |
| NOV7j | ALANTLMALQMGVSVVDSSVAGLGGCPYAQGASGNLATEDLVYMLEGLGIHTGVNLQKLL |
| NOV7a | EAGNFICQALNRKTSSKVAQATCKL |
| NOV7b | EAGNFICQALNRKTSSKVAQATSKL |
| NOV7c | EAGNFICQALNRKTSSKVAQATCKL |
| NOV7d | EAGNFICQALNRKTSSKVAQATCKL |
| NOV7e | EAGNFICQALNRKTSSKVAQATCKL |
| NOV7f | EAGNFICQALNRKTSSKVAQATCKL |
| NOV7g | EAGNFICQALNRKTSSKVAQATC—— |
| NOV7h | EAGNFICQALNRKTSSKVAQATCKL |
| NOV7i | EAGNFICQALNRKTSSKVAQATCKL |
| NOV7j | EAGNFICQALNRKTSSKVAQATCKL |
| NOV7a | (SEQ ID NO:60) |
| NOV7b | (SEQ ID NO:62) |
| NOV7c | (SEQ ID NO:64) |
| NOV7d | (SEQ ID NO:66) |
| NOV7e | (SEQ ID NO:68) |
| NOV7f | (SEQ ID NO:70) |
| NOV7g | (SEQ ID NO:72) |
| NOV7h | (SEQ ID NO:74) |
| NOV7i | (SEQ ID NO:76) |
| NOV7j | (SEQ ID NO:78) |

[0606] Further analysis of the NOV7a protein yielded the following properties shown in Table G7.

TABLE G7
Protein Sequence Properties NOV7a

| SignalP | Cleavage site between residues 25 and 26 | | | |
|---|---|---|---|---|
| analysis: | | | | |
| PSORT II | PSG: a new signal peptide prediction method | | | |
| analysis: | N-region: length 11; pos. chg 4; neg. chg 0 | | | |
| | H-region: length 7; peak value 0.99 | | | |
| | PSG score: −3.41 | | | |
| | GvH: von Heijne's method for signal seq. recognition | | | |
| | GvH score (threshold: −2.1): −2.69 | | | |
| | possible cleavage site: between 23 and 24 | | | |
| | >>> Seems to have no N-terminal signal peptide | | | |
| | ALOM: Klein et al's method for TM region allocation | | | |
| | Init position for calculation: 1 | | | |
| | Tentative number of TMS(s) for the threshold 0.5: 0 | | | |
| | number of TMS(s) . . . fixed | | | |
| | PERIPHERAL Likelihood = 1.80 (at 115) | | | |
| | ALOM score: 1.80 (number of TMSs: 0) | | | |
| | MITDISC: discrimination of mitochondrial targeting seq | | | |
| | R content: | 5 | Hyd Moment(75): | 10.64 |
| | Hyd Moment(95): | 9.40 | G content: | 2 |
| | D/E content: | 1 | S/T content: | 6 |

```
Score: 1.44
Gavel: prediction of cleavage sites for mitochondrial preseq
R-2 motif at 42 KRV|KI
NUCDISC: discrimination of nuclear localization signals
pat4: none
pat7: PKRVKIV (5) at 30
bipartite: none
content of basic residues: 9.8%
NLS Score: −0.04
KDEL: ER retention motif in the C-terminus: none
ER Membrane Retention Signals:
XXRR-like motif in the N-terminus: AAMR
KKXX-like motif in the C-terminus: ATCK
SKL: peroxisomal targeting signal in the C-terminus: CKL
PTS2: 2nd peroxisomal targeting signal: none
VAC: possible vacuolar targeting motif: found
TLPK at 28
RNA-binding motif: none
Actinin-type actin-binding motif:
type 1: none
type 2: none
NMYR: N-myristoylation pattern: none
Prenylation motif: none
memYQRL: transport motif from cell surface to Golgi: none
Tyrosines in the tail: none
Dileucine motif in the tail: none
checking 63 PROSITE DNA binding motifs: none
checking 71 PROSITE ribosomal protein motifs: none
checking 33 PROSITE prokaryotic DNA binding motifs: none
NNCN: Reinhardt's method for Cytoplasmic/Nuclear
discrimination
Prediction: cytoplasmic
Reliability: 94.1
COIL: Lupas's algorithm to detect coiled-coil regions
total: 0 residues
Final Results (k = 9/23):
87.0%: mitochondrial
  4.3%: Golgi
  4.3%: cytoplasmic
  4.3%: nuclear
>> prediction for CG96859-03 is mit (k = 23)
```

[0607] A search of the NOV7a protein against the Geneseq database, a proprietary database that contains sequences published in patents and patent publication, yielded several homologous proteins shown in Table G8.

TABLE G8
Geneseq Results for NOV7a

| | | NOV7a | Identities/ | |
|---|---|---|---|---|
| | | Residues/ | Similarities for | |
| Geneseq | Protein/Organism/Length | Match | the Matched | Expect |
| Identifier | [Patent #, Date] | Residues | Region | Value |
| ABB99771 | Protein related to | 1 . . . 325 | 324/325 (99%) | 0.0 |
| | hydroxymethylglutaryl-CoA lyase- | 1 . . . 325 | 324/325 (99%) | |
| | like enzyme - Homo sapiens, 325 aa. | | | |
| | [WO200299093-A2, 12-DEC-2002] | | | |
| AAU75774 | Human 3-hydroxy-3-methylglutaryl | 1 . . . 325 | 324/325 (99%) | 0.0 |
| | coenzyme A lyase (HMGCL) protein - | 1 . . . 325 | 324/325 (99%) | |
| | Homo sapiens, 325 aa. | | | |
| | [WO200198315-A2, 27-DEC-2001] | | | |
| AAU01613 | Gene #24 human secreted protein | 30 . . . 321 | 234/292 (80%) | e−137 |
| | homologous amino acid sequence - | 1 . . . 292 | 266/292 (90%) | |
| | Homo sapiens, 293 aa. | | | |
| | [WO200123547-A1, 05-APR-2001] | | | |
| ABB99772 | Sequence of human | 20 . . . 322 | 215/303 (70%) | e−126 |
| | hydroxymethylglutaryl-CoA lyase- | 50 . . . 352 | 259/303 (84%) | |
| | like enzyme - Homo sapiens, 355 aa. | | | |
| | [WO200299093-A2, 12-DEC-2002] | | | |
| ABB99770 | Sequence of human | 20 . . . 322 | 215/303 (70%) | e−126 |
| | hydroxymethylglutaryl-CoA lyase- | 35 . . . 337 | 259/303 (84%) | |
| | like enzyme - Homo sapiens, 340 aa. | | | |
| | [WO200299093-A2, 12-DEC-2002] | | | |

[0608] In a BLAST search of public sequence databases, the NOV7a protein was found to have homology to the proteins shown in the BLASTP data in Table G9.

TABLE G9
Public BLASTP Results for NOV7a

| | | NOV7a | Identities/ | |
|---|---|---|---|---|
| Protein | | Residues/ | Similarities for | |
| Accession | | Match | the Matched | Expect |
| Number | Protein/Organism/Length | Residues | Portion | Value |
| P35914 | Hydroxymethylglutaryl-CoA lyase, | 1 . . . 325 | 325/325 (100%) | 0.0 |
| | mitochondrial precursor (EC 4.1.3.4) | 1 . . . 325 | 325/325 (100%) | |
| | (HMG-CoA lyase) (HL) (3-hydroxy- | | | |
| | 3-methylglutarate-CoA lyase) - | | | |
| | Homo sapiens (Human), 325 aa. | | | |
| A45470 | hydroxymethylglutaryl-CoA lyase | 1 . . . 325 | 324/325 (99%) | 0.0 |
| | (EC 4.1.3.4) - human, 325 aa. | 1 . . . 325 | 324/325 (99%) | |
| Q8HXZ6 | 3 -hydroxymethyl-3-methylglutaryl- | 1 . . . 325 | 313/325 (96%) | e−176 |
| | coenzyme A lyase - Macaca | 1 . . . 325 | 315/325 (96%) | |
| | fascicularis (Crab eating macaque) | | | |
| | (Cynomolgus monkey), 325 aa. | | | |
| CAB40160 | DJ886K2.2 (Hydroxymethylglutaryl- | 21 . . . 325 | 305/305 (100%) | e−172 |
| | CoA lyase) - Homo sapiens (Human), | 1 . . . 305 | 305/305 (100%) | |
| | 305 aa (fragment). | | | |
| P97519 | Hydroxymethylglutaryl-CoA lyase, | 1 . . . 325 | 289/325 (88%) | e−167 |
| | mitochondrial precursor (EC 4.1.3.4) | 1 . . . 325 | 311/325 (94%) | |
| | (HMG-CoA lyase) (HL) (3-hydroxy- | | | |
| | 3-methylglutarate-CoA lyase) - | | | |
| | Rattus norvegicus (Rat), 325 aa. | | | |

[0609] PFam analysis predicts that the NOV7a protein contains the domains shown in the Table

TABLE G10
Domain Analysis of NOV7a

| | | Identities/ | |
|---|---|---|---|
| | NOV7a | Similarities for | |
| Pfam Domain | Match Region | the Matched Region | Expect Value |
| HMGL-like | 41 . . . 314 | 103/307 (34%) | 4.1e−118 |
| | | 249/307 (81%) | |

### EXAMPLE G3

### Single Nucleotide Polymorphisms (SNPs) of CG96859-03

[0610] Variant sequences are included in this application. A variant sequence can include a single nucleotide polymorphism (SNP). A SNP can, in some instances, be referred to as a “cSNP” to denote that the nucleotide sequence containing the SNP originates as a cDNA. A SNP can arise in several ways. For example, a SNP may be due to a substitution of one nucleotide for another at the polymorphic site. Such a substitution can be either a transition or a transversion. A SNP can also arise from a deletion of a nucleotide or an insertion of a nucleotide, relative to a reference allele. In this case, the polymorphic site is a site at which one allele bears a gap with respect to a particular nucleotide in another allele. SNPs occurring within genes may result in an alteration of the amino acid encoded by the gene at the position of the SNP. Intragenic SNPs may also be silent, however, in the case that a codon including a SNP encodes the same amino acid as a result of the redundancy of the genetic code. SNPs occurring outside the region of a gene, or in an intron within a gene, do not result in changes in any amino acid sequence of a protein but may result in altered regulation of the expression pattern for example, alteration in temporal expression, physiological response regulation, cell type expression regulation, intensity of expression, stability of transcribed message.

[0611] Method of novel SNP Identification: SNPs are identified by analyzing sequence assemblies using CuraGen's proprietary SNPTool algorithm. SNPTool identifies variation in assemblies with the following criteria: SNPs are not analyzed within 10 base pairs on both ends of an alignment; Window size (number of bases in a view) is 10; The allowed number of mismatches in a window is 2; Minimum SNP base quality (PHRED score) is 23; Minimum number of changes to score an SNP is 2/assembly position. SNPTool analyzes the assembly and displays SNP positions, associated individual variant sequences in the assembly, the depth of the assembly at that given position, the putative assembly allele frequency, and the SNP sequence variation. Sequence traces are then selected and brought into view for manual validation. The consensus assembly sequence is imported into CuraTools along with variant sequence changes to identify potential amino acid changes resulting from the SNP sequence variation. Comprehensive SNP data analysis is then exported into the SNPCalling database.

[0612] Method of novel SNP Confirmation: SNPs are confirmed employing a validated method know as Pyrosequencing. Detailed protocols for Pyrosequencing can be found in: Alderborn et al. Determination of Single Nucleotide Polymorphisms by Real-time Pyrophosphate DNA Sequencing. (2000). Genome Research. 10, Issue 8, August. 1249-1265.

[0613] In brief, Pyrosequencing is a real time primer extension process of genotyping. This protocol takes double-stranded, biotinylated PCR products from genomic DNA samples and binds them to streptavidin beads. These beads are then denatured producing single stranded bound DNA. SNPs are characterized utilizing a technique based on an indirect bioluminometric assay of pyrophosphate (PPi) that is released from each dNTP upon DNA chain elongation. Following Klenow polymerase-mediated base incorporation, PPi is released and used as a substrate, together with adenosine 5′-phosphosulfate (APS), for ATP sulfurylase, which results in the formation of ATP. Subsequently, the ATP accomplishes the conversion of luciferin to its oxi-derivative by the action of luciferase. The ensuing light output becomes proportional to the number of added bases, up to about four bases. To allow processivity of the method dNTP excess is degraded by apyrase, which is also present in the starting reaction mixture, so that only dNTPs are added to the template during the sequencing. The process has been fully automated and adapted to a 96-well format, which allows rapid screening of large SNP panels.

Results

[0614] The DNA and protein sequences for the novel single nucleotide polymorphic variants of the HYDROXYMETHYLGLUTARYL-COA LYASE-like gene of CuraGen Acc. No. CG96859-03 are reported in Table G11. Variants are reported individually but any combination of all or a select subset of variants are also included. In Table G11, the positions of the variant bases and the variant amino acid residues are underlined. In summary, there are 1 variants reported in Table G11. Variant 13379476 is a C to T SNP at 725 bp of the nucleotide sequence that results in no change in the protein sequence (silent).

TABLE G11
Variant of nucleotide sequence Acc.
No. CG96859-03 (SEQ ID NO: 59)

| | Nucleotides | | | Amino Acids | | |
|---|---|---|---|---|---|---|
| Variant | Position | Initial | Modified | Position | Initial | Modified |
| 13379476 | 725 | C | T | 237 | Thr | Thr |

[0615] TABLE G12
Variant Sequences

(SEQ ID NO:169)

TableG12A1.
Nucleotide sequence of variant 13379476 NOV7a1n (underlined). C/T

| | |
|---|---|
| 1 | AAATTCCGGCCAAGATGGCAGCAATGAGGAAGGCGCTTCCGCGGCGACTGGTGGGCTTGGCGTCCCTCCGGGCTGTCAGC |
| 81 | ACCTCATCTATGGGCACTTTACCAAAGCGGGTGAAAATTGTGGAAGTTGGTCCCCGAGATGGACTACAAAATGAAAAGAA |
| 161 | TATCGTATCTACTCCAGTGAAAATCAAGCTGATAGACATGCTTTCTGAAGCAGGACTCTCTGTTATAGAAACCACCAGCT |
| 241 | TTGTGTCTCCTAAGTGGGTTCCCCAGATGGGTGACCACACTGAAGTCTTGAAGGGCATTCAGAAGTTTCCTGGCATCAAC |
| 321 | TACCCAGTCCTGACCCCAAATTTGAAAGGCTTCGAGGCAGCGGTTGCTGCTGGAGCCAAGGAAGTAGTCATCTTTGGAGC |
| 401 | TGCCTCAGAGCTCTTCACCAAGAAGAACATCAATTGTTCCATAGAGGAGAGTTTTCAGAGGTTTGACGCAATCCTGAAGG |
| 481 | CAGCGCAGTCAGCCAATATTTCTGTGCGGGGGTACGTCTCCTGTGCTCTTGGCTGCCCTTATGAAGGGAAGATCTCCCCA |
| 561 | GCTAAAGTAGCTGAGGTCACCAAGAAGTTCTACTCAATGGGCTGCTACGAGATCTCCCTGGGGGACACCATTGGTGTGGG |
| 641 | CACCCCAGGGATCATGAAAGACATGCTGTCTGCTGTCATGCAGGAAGTGCCTCTGGCTGCCCTGGCTGTCCACTGCCATG |
| 721 | ACACTTATGGTCAAGCCCTGGCCAACACCTTGATGGCCCTGCAGATGGGAGTGAGTGTCGTGGACTCTTCTGTGGCAGGA |
| 801 | CTTGGAGGCTGTCCCTACGCACAGGGGGCATCAGGAAACTTGGCCACAGAAGACCTGGTCTACATGCTAGAGGGCTTGGG |
| 881 | CATTCACACGGGTGTGAATCTCCAGAAGCTTCTGGAAGCTGGAAACTTTATCTGTCAAGCCCTGAACAGAAAAACTAGCT |
| 961 | CCAAAGTGGCTCAGGCTACCTGTAAACTCTGAGCCCCTTGCCCACCTGAAGGCCTGGGGATGATGTGGAAATAAGGGGCA |
| 1041 | T |

(SEQ ID NO:170)

TableG12A2.
Protein sequence of variant NOV7a1n (underlined).

| | |
|---|---|
| 1 | MAAMRKALPRRLVGLASLRAVSTSSMGTLPKRVKIVEVGPRDGLQNEKNIVSTPVKIKLIDMLSEAGLSVIETTSFVSPK |
| 81 | WVPQMGDHTEVLKGIQKFPGINYPVLTPNLKGFEAAVAAGAKEVVIFGAASELFTKKNINCSIEESFQRFDAILKAAQSA |
| 161 | NISVRGYVSCALGCPYEGKISPAKVAEVTKKEYSMGCYEISLGDTIGVGTPGIMKDMLSAVMQEVPLAALAVHCHDTYGQ |
| 241 | ALANTLMALQMGVSVVDSSVAGLGGCPYAQGASGNLATEDLVYMLEGLGIHTGVNLQKLLEAGNFICQALNRKTSSKVAQ |
| 321 | ATCKL |

TableG12A3.
Alteration effect
No change.

### EXAMPLE G4

### Expression Profiles of HMG CoA Lyase (CG96859-03)—like Protein

[0616] The protocol for quantitative expression analysis is disclosed in Example Q9.

[0617] Expression of gene CG96859-03 was assessed using the primer-probe set Ag8471, described in Table G13. Results of the RTQ-PCR runs are shown in Table G14.

TABLE G13
Probe Name Ag8471

| | | | Start | SEQ ID |
|---|---|---|---|---|
| Primers | Sequences | Length | Position | No |
| Forward | 5′-aagctggtggtttctataacagaga-3′ | 25 | 801 | 218 |
| Probe | TET-5′-tcctgcttcagaaagcatgtctatcagc-3′- | 28 | 827 | 219 |
| | TAMRA | | | |
| Reverse | 5′-aagaatatcgtatctactccagtgaaaat-3′ | 29 | 858 | 220 |

[0618] TABLE G14
General_screening_panel_v1.7

| Tissue Name | A |
|---|---|
| Adipose | 42.3 |
| HUVEC | 25.7 |
| Melanoma* Hs688(A).T | 0.0 |
| Melanoma* Hs688(B).T | 54.7 |
| Melanoma (met) SK-MEL-5 | 28.7 |
| Testis | 12.1 |
| Prostate ca. (bone met) PC-3 | 0.9 |
| Prostate ca. DU145 | 32.8 |
| Prostate pool | 9.2 |
| Uterus pool | 3.1 |
| Ovarian ca. OVCAR-3 | 8.4 |
| Ovarian ca. (ascites) SK-OV-3 | 1.6 |
| Ovarian ca. OVCAR-4 | 0.0 |
| Ovarian ca. OVCAR-5 | 40.6 |
| Ovarian ca. IGROV-1 | 0.0 |
| Ovarian ca. OVCAR-8 | 44.4 |
| Ovary | 14.6 |
| Breast ca. MCF-7 | 31.0 |
| Breast ca. MDA-MB-231 | 28.5 |
| Breast ca. BT 549 | 30.4 |
| Breast ca. T47D | 35.4 |
| Breast pool | 0.0 |
| Trachea | 30.8 |
| Lung | 38.4 |
| Fetal Lung | 22.4 |
| Lung ca. NCI-N417 | 6.3 |
| Lung ca. LX-1 | 10.7 |
| Lung ca. NCI-H146 | 4.7 |
| Lung ca. SHP-77 | 29.9 |
| Lung ca. NCI-H23 | 31.2 |
| Lung ca. NCI-H460 | 13.4 |
| Lung ca. HOP-62 | 100.0 |
| Lung ca. NCI-H522 | 23.2 |
| Lung ca. DMS-114 | 7.6 |
| Liver | 71.7 |
| Fetal Liver | 72.2 |
| Kidney pool | 83.5 |
| Fetal Kidney | 18.9 |
| Renal ca. 786-0 | 64.2 |
| Renal ca. A498 | 10.5 |
| Renal ca. ACHN | 24.0 |
| Renal ca. UO-31 | 48.0 |
| Renal ca. TK-10 | 24.0 |
| Bladder | 14.9 |
| Gastric ca. (liver met.) NCI-N87 | 0.4 |
| Stomach | 1.4 |
| Colon ca. SW-948 | 12.9 |
| Colon ca. SW480 | 0.2 |
| Colon ca. (SW480 met) SW620 | 33.0 |
| Colon ca. HT29 | 57.8 |
| Colon ca. HCT-116 | 40.3 |
| Colon cancer tissue | 1.4 |
| Colon ca. SW1116 | 11.2 |
| Colon ca. Colo-205 | 26.4 |
| Colon ca. SW-48 | 14.4 |
| Colon | 22.5 |
| Small Intestine | 4.1 |
| Fetal Heart | 6.0 |
| Heart | 7.4 |
| Lymph Node pool 2 | 35.6 |
| Fetal Skeletal Muscle | 9.8 |
| Skeletal Muscle pool | 5.4 |
| Skeletal Muscle | 42.6 |
| Spleen | 16.6 |
| Thymus | 9.9 |
| CNS cancer (glio/astro) SF-268 | 9.4 |
| CNS cancer (glio/astro) T98G | 13.9 |
| CNS cancer (neuro; met) SK-N-AS | 0.3 |
| CNS cancer (astro) SF-539 | 88.9 |
| CNS cancer (astro) SNB-75 | 44.1 |
| CNS cancer (glio) SNB-19 | 33.9 |
| CNS cancer (glio) SF-295 | 9.1 |
| Brain (Amygdala) | 10.2 |
| Brain (Cerebellum) | 27.7 |
| Brain (Fetal) | 14.9 |
| Brain (Hippocampus) | 13.3 |
| Cerebral Cortex pool | 9.2 |
| Brain (Substantia nigra) | 4.0 |
| Brain (Thalamus) | 17.1 |
| Brain (Whole) | 29.5 |
| Spinal Cord | 11.8 |
| Adrenal Gland | 56.6 |
| Pituitary Gland | 17.6 |
| Salivary Gland | 15.1 |
| Thyroid | 59.0 |
| Pancreatic ca. PANC-1 | 19.9 |
| Pancreas pool | 6.1 |

Column A - Rel. Exp. (%) Ag8471, Run 406009117

Panels 1, 1.1, 1.2, and 1.3D

[0619] Panels 1, 1.1, 1.2 and 1.3D included 2 control wells (genomic DNA control and chemistry control) and 94 wells of cDNA samples from cultured cell lines and primary normal tissues. Cell lines were derived from carcinomas (ca) including: lung, small cell (s cell var), non small cell (non-s or non-sm); breast; melanoma; colon; prostate; glioma (glio), astrocytoma (astro) and neuroblastoma (neuro); squamous cell (squam); ovarian; liver; renal; gastric and pancreatic from the American Type Culture Collection (ATCC, Bethesda, Md.). Normal tissues were obtained from individual adults or fetuses and included: adult and fetal skeletal muscle, adult and fetal heart, adult and fetal kidney, adult and fetal liver, adult and fetal lung, brain, spleen, bone marrow, lymph node, pancreas, salivary gland, pituitary gland, adrenal gland, spinal cord, thymus, stomach, small intestine, colon, bladder, trachea, breast, ovary, uterus, placenta, prostate, testis and adipose. The following abbreviations are used in reporting the results: metastasis (met); pleural effusion (pl. eff or pl effusion) and * indicates established from metastasis.

General_screening_panel_v1.4, v1.5, v1.6 and v1.7

[0620] Panels 1.4, 1.5, 1.6 and 1.7 were as described for Panels 1, 1.1, 1.2 and 1.3D, above except that normal tissue samples were pooled from 2 to 5 different adults or fetuses.

[0621] General_screening_panel_v1.7 Summary: Ag8471 The highest expression of this gene was detected in a lung cancer sample (CT=26). This gene is widely expressed. Among tissues with metabolic or endocrine function, this gene is expressed at high to moderate levels in pancreas, adipose, adrenal gland, thyroid, pituitary gland, skeletal muscle, heart, liver and the gastrointestinal tract. Therapeutic modulation of this gene, expressed protein and/or use of antibodies or small molecule drugs targeting the gene or gene product will useful in the treatment of endocrine/metabolically related diseases, such as obesity and diabetes.

### EXAMPLE G5

### Screening Assays for Modulators of HMG CoA Lyase

[0622] A non-exhaustive list of cell lines that express the HMG CoA Lyase can be obtained from the differential gene expression (RTQ-PCR) results presented herein.

[0623] Potential methods for measurement of HMG-CoA lyase enzymatic activity include citrate synthase-coupled assay of Stegink and Coon, (Stereospecificity and other properties of highly purified beta-hydroxy-beta-methylglutaryl coenzyme A cleavage enzyme from bovine liver, J Biol. Chem. 1968 Oct. 25; 243 (20):5272-9), further modified by Kramer and Miziorko (Purification and characterization of avian liver 3-hydroxy-3-methylglutaryl coenzyme A lyase, J Biol. Chem. 1980 Nov. 25; 255 (22):11023-8).

[0624] Our results indicate that a modulator of HMG CoA Lyase activity, such as an inhibitor, activator, antagonist, or agonist of HMG CoA Lyase may be useful for treatment of such disorders as obesity, diabetes, and insulin resistance, as well as for enhancement of insulin secretion.

Protocols

[0625] Following Examples describe procedures, protocols and technologies described in this application.

### EXAMPLE Q1

### Mouse Diet-Induced Obesity (DIO) Study (BP24.02)

Overview

[0626] The predominant cause for obesity in clinical populations is excess caloric intake. This so-called diet-induced obesity (DIO) is mimicked in animal models by feeding high fat diets of greater than 40% fat content. The DIO study was established to identify the gene expression changes contributing to the development and progression of diet-induced obesity. In addition, the study design sought to identify the factors that led to the ability of certain individuals to resist the effects of a high fat diet and thereby prevent obesity.

[0627] The sample groups for the study normally had body weights +1 S.D., +4 S.D. and +7 S.D. of the chow-fed controls. In addition, the biochemical profile of the +7 S.D. mice normally revealed a further stratification of these animals into mice that retained a normal glycemic profile in spite of obesity and mice that demonstrated hyperglycemia. Tissues examined included hypothalamus, brainstem, liver, retroperitoneal white adipose tissue (WAT), epididymal WAT, brown adipose tissue (BAT), gastrocnemius muscle (fast twitch skeletal muscle) and soleus muscle (slow twitch skeletal muscle). The differential gene expression profiles for these tissues revealed genes and pathways that can be used as therapeutic targets for obesity and/or diabetes.

Protocol

[0628] 5 groups of mice were used with 3 mice per group. Occasionally, more than 3 mice were used in a single group in order to preserve correct parameters for the study. In such case only 3 mice would be sacrificed for tissues. The groups were grouped based on the following parameters:
[0629] Group 1. Chow fed mice
[0630] Group 2. Mice fed a high fat diet who were 1 standard deviation in weight above the chow fed mice.
[0631] Group 3. Mice fed a high fat diet who were 4 standard deviations in weight above the chow fed mice.
[0632] Group 4. Mice fed a high fat diet who were 7 standard deviations in weight above the chow fed mice and who had normal glucose levels.
[0633] Group 5. Mice fed a high fat diet who were 7 standard deviation in weight above the chow fed mice and who were hyperglycemic.

[0634] In each group of mice, there were 3 mice that were sacrificed and tissues harvested for the study.

### EXAMPLE Q2

### Rat Pancreatic Islet Study (BP24.03)

Overview

[0635] An important clinical goal in the early phases of Type II diabetes is to increase insulin secretion from the beta cells of the pancreas. Numerous agents have been identified that can modulate insulin secretion experimentally and in therapeutic situations. When applied to isolated rat pancreatic islets, the changes in gene expression can be correlated with insulin secretion. In this study, acute and chronic changes in gene expression were examined from islets treated with an agent after short (4 hour) and long-term (5 days) exposure, respectively, compared with the basal state (11 mM glucose). The agents included elevated (25 mM) glucose, glucose (11 mM) and exendin-4 (1 nM), glucose (11 mM) and glybenclamide (50 uM) and glucose (11 mM) and oleate (2 mM).

Protocol

All samples were isolated rat islets. They differed only in the treatment that they received. The following samples were in the 4 hour group:

[0636] 1) 11 mM glucose
[0637] 2) 25 mM glucose
[0638] 3) 11 mM glucose & JTT 608
[0639] 4) 11 mM glucose & Carbacol
[0640] 5) 11 mM glucose & Exendin4

[0641] Isolated rat islets were treated with either 11 mM glucose (basal state) or 25 mM glucose (elevated glucose.). Then there were 3 additional sets of rat islets that were treated with 11 mM glucose and one of the 3 agents: JTT 608, Carbacol, or Exendin-4.

The following samples were in the 5 day group:

[0642] 1) 11 mM glucose
[0643] 2) 25 mM glucose
[0644] 3) 11 mM glucose & 1 nM Exendin
[0645] 4) 11 mM glucose & 50 uM Glybenclamide
[0646] 5) 11 mM glucose & 2 mM Oleic Acid

[0647] Isolated rat islets were treated with either 11 mM glucose (basal state) or 25 mM glucose (elevated glucose.). Then there were 3 additional sets of rat islets that were treated with 11 mM glucose and one of the 3 agents: exendin, glybenclamide, or oleic acid.

[0648] From all 10 samples, each was split into 2 replicates. The 2 replicates were run for differential gene expression analysis (GeneCalling®).

### EXAMPLE Q3

### Rat Insulin Sensitivity Study (BP24.05)

Protocol

[0649] ZDF rats or their lean littermates were treated with a variety of agents that are known to alter insulin sensitivity. Metformin, vanadate, and AICAR enhance tissue response to insulin, while the free fatty acids generated by Liposyn (intravenous lipid infusion) treatment reduces the response. A variety of tissues were harvested, including gastrocnemius and soleus muscles, liver, retroperitoneal and epididymal WAT, and IBAT.

[0650] Only gastrocnemius and soleus muscles were processed for differential gene expression analysis (GeneCalling®).

There were 5 groups of samples:

[0651] 1) Metformin vehicle (vehicle M)
[0652] 2) Metformin treated rats
[0653] 3) AICAR and vanadate vehicle (vehicle AV)
[0654] 4) AICAR treated rats
[0655] 5) Vanadate treated rats

[0656] Treatment was for 4 hours and glucose values before and after treatment were obtained. Each sample was done in triplicate (5 groups X 3 rats X 2 tissues).

[0657] In the second part of the study rats were given an intravenous lipid infusion which should reduce tissue response to insulin in treated rats.

In the intravenous lipid infusion part of the study 2 groups were used:

[0658] 1) Rats treated with lipid infusion vehicle.
[0659] 2) Rats treated with lipid infusion.

[0660] In each group, there were 3 rats (done in triplicate) and soleus and gastrocnemius samples were processed for differential gene expression analysis (GeneCalling®) (2 groups X 3 samples X 2 tissues).

### EXAMPLE Q4

### Mouse TZD Response Study (BP24.07)

Overview and Protocol

[0661] The peroxisome proliferator-activated receptor gamma (PPARg) is the member of the nuclear hormone receptor subfamily of transcription factors that plays a major role in regulation of metabolism. The thiazolidinedione (TZD) drugs, including rosiglitazone, are synthetic agonists of PPARg receptors that can normalize elevated plasma glucose levels in obese, diabetic rodents and are often quite efficacious therapeutic agents for the treatment of noninsulin-dependent diabetes mellitus in humans. Diabetic animals demonstrate differential responses to TZD treatment. To understand the basis for this differential response we compared changes in gene expression between diabetic animals that responded favorably and that did not respond to TZD treatment. Female db/db mice were treated daily with 10 mg per kilogram body weight rosiglitazone for 7 days. On day 8, the mice were bled for blood glucose. Treated mice were grouped into either a responder group that demonstrated a significant decrease of their hyperglycemia and a non-responder group that demonstrated no change in their blood glucose level. Gene expression in skeletal muscle and adipose tissues was compared between untreated diabetic mice and the two sub-groups of TZD treated mice.

[0662] 3 tissues were collected for differential gene expression analysis (GeneCalling®): liver, thigh muscle, and uterine white adipose.

3 groups of samples were used:

[0663] 1) Vehicle treated
[0664] 2) Rosiglitazone responders
[0665] 3) Rosiglitazone non-responders

[0666] Each group had 3 mice in it. Total of 27 samples were processed for differential gene expression analysis (GeneCalling®).

### EXAMPLE Q5

### Insulin Resistance Study (MB.01)

[0667] The spontaneoulsy hypertensive rat (SHR) is a strain exhibiting features of the human Metabolic Syndrome X. The phenotypic features include obesity, hyperglycemia, hypertension, dyslipidemia and dysfibrinolysis. Tissues were removed from adult male rats and a control strain (Wistar_Kyoto) to identify the gene expression differences that underlie the pathologic state in the SHR and in animals treated with various anti-hyperglycemic agents such as troglitizone. Tissues included sub-cutaneous adipose, visceral adipose, brain, muscle, and liver. Each tissue was collected in triplicate for differential gene expression analysis (GeneCalling®).

### EXAMPLE Q6

### Genetically Obese Mice vs Genetically Lean Mice Study (MB.04)

Overview

[0668] A number of genetic models of obesity have been studied, most prominently in mouse and rat, but only a few causative genes have been identified. In this study, a set of mouse genetic models were studied in order to identify by positional expression cloning the genes for obesity in mice, which genes may be relevant to human obesity.

Protocol

[0669] 7 strains of mice were used. Some exhibited a lean phenotype, some were normal weight mice, and some of the mice were genetically obese.

The following strains of mice used in the study:

[0670] 1) CAST/E1—lean phenotype
[0671] 2) SM/J black—lean phenotype
[0672] 3) SWR/J—normal phenotype
[0673] 4) C57L/J—normal phenotype
[0674] 5) C57BL/6J—normal phenotype
[0675] 6) AKR/J—obese phenotype
[0676] 7) NZB/BINJ—obese phenotype

[0677] Various tissues were processed for differential gene expression analysis (GeneCalling®): brain, liver, muscle, and adipose.

[0678] Samples were processed in triplicate (i.e. 3 brain samples from 3 CAST/E1 mice). Total of 7 strains X 4 tissues X 3 samples=84 samples were used.

### EXAMPLE Q7

### Method of Identifying the Differentially Expressed Gene and Gene Product (GeneCalling®)

[0679] The GeneCalling® technology is a proprietary method of performing differential gene expression profiling between two or more samples developed at CuraGen and described by Shimkets, et al., “Gene expression analysis by transcript profiling coupled to a gene database query” Nature Biotechnology 17:198-803 (1999). GeneCalling® technology is also disclose in U.S. Pat. No. 5,871,697. cDNA was derived from various samples representing multiple tissue types, normal and diseased states, physiological states, and developmental states from different donors. Samples were obtained as whole tissue, primary cells or tissue cultured primary cells or cell lines. Cells and cell lines may have been treated with biological or chemical agents that regulate gene expression, for example, growth factors, chemokines or steroids. The cDNA thus derived was then digested with up to as many as 120 pairs of restriction enzymes and pairs of linker-adaptors specific for each pair of restriction enzymes were ligated to the appropriate end. The restriction digestion generates a mixture of unique cDNA gene fragments. Limited PCR amplification is performed with primers homologous to the linker adapter sequence where one primer is biotinylated and the other is fluorescently labeled. The doubly labeled material is isolated and the fluorescently labeled single strand is resolved by capillary gel electrophoresis. A computer algorithm compares the electropherograms from an experimental and control group for each of the restriction digestions. This and additional sequence-derived information is used to predict the identity of each differentially expressed gene fragment using a variety of genetic databases. The three methods routinely used to confirm the identity of the gene fragment found to have altered expression in models of or patients with obesity and/or diabetes are described below.

A). Direct Sequencing

[0680] The differentially expressed gene fragment is isolated, cloned into a plasmid, and sequenced. Afterwards, the sequence information is used to design an oligonucleotide corresponding to either or both termini of the gene fragment. This oligonucleotide, when used in a competitive PCR reaction, will ablate the electropherographic band from which the sequence is derived.

B). Competitive PCR

[0681] In competitive PCR, the electropherographic peaks corresponding to the gene fragment of the gene of interest are ablated when a gene-specific primer (designed from the sequenced band or available databases) competes with primers in the linker-adaptors during the PCR amplification.

C). PCR with Perfect or Mismatched 3′ Nucleotides (TraPping)

[0682] This method utilizes a competitive PCR approach using a degenerate set of primers that extend one or two nucleotides into the gene-specific region of the fragment beyond the flanking restriction sites. As in the competitive PCR approach, primers that lead to the ablation of the electropherographic band add additional sequence information. In conjunction with the size of the gene fragment and the 12 nucleotides of sequence derived from the restriction sites, this additional sequence data can uniquely define the gene after database analysis. TraPping is disclosed in a published PCT application Pub. No. WO 01/49886.

### EXAMPLE Q8

### Identification of Human Sequences

[0683] The laboratory cloning was performed using one or more of the methods summarized below:

[0684] SeqCalling™Technology: cDNA was derived from various human samples representing multiple tissue types, normal and diseased states, physiological states, and developmental states from different donors. Samples were obtained as whole tissue, primary cells or tissue cultured primary cells or cell lines. Cells and cell lines may have been treated with biological or chemical agents that regulate gene expression, for example, growth factors, chemokines or steroids. The cDNA thus derived was then sequenced using CuraGen Corporation's SeqCalling technology that is disclosed in full in U.S. Ser. No. 09/417,386 filed Oct. 13, 1999 (as well as in PCT application Pub. No.: WO 00/40757), and 09/614,505 filed Jul. 11, 2000. Sequence traces were evaluated manually and edited for corrections if appropriate. cDNA sequences from all samples were assembled together, sometimes including public human sequences, using bioinformatics programs to produce a consensus sequence for each assembly. Each assembly is included in CuraGen Corporation's database. Sequences were included as components for assembly when the extent of identity with another component was at least 95% over 50 bp. Each assembly represents a gene or portion thereof and includes information on variants, such as splice forms single nucleotide polymorphisms (SNPs), insertions, deletions and other sequence variations.

[0685] Variant sequences are also included in this application. A variant sequence can include a single nucleotide polymorphism (SNP). A SNP can, in some instances, be referred to as a “cSNP” to denote that the nucleotide sequence containing the SNP originates as a cDNA. A SNP can arise in several ways. For example, a SNP may be due to a substitution of one nucleotide for another at the polymorphic site. Such a substitution can be either a transition or a transversion. A SNP can also arise from a deletion of a nucleotide or an insertion of a nucleotide, relative to a reference allele. In this case, the polymorphic site is a site at which one allele bears a gap with respect to a particular nucleotide in another allele. SNPs occurring within genes may result in an alteration of the amino acid encoded by the gene at the position of the SNP. Intragenic SNPs may also be silent, when a codon including a SNP encodes the same amino acid as a result of the redundancy of the genetic code. SNPs occurring outside the region of a gene, or in an intron within a gene, do not result in changes in any amino acid sequence of a protein but may result in altered regulation of the expression pattern. Examples include alteration in temporal expression, physiological response regulation, cell type expression regulation, intensity of expression, and stability of transcribed message.

[0686] Information associated with genomic clones, public genes and ESTs sharing sequence identity with the disclosed sequences and CuraGen Corporation's Electronic Northern bioinformatic tool.

[0687] RACE: Techniques based on the polymerase chain reaction such as rapid amplification of cDNA ends (RACE), were used to isolate or complete the predicted sequence of the cDNA of the invention. Usually multiple clones were sequenced from one or more human samples to derive the sequences for fragments. Various human tissue samples from different donors were used for the RACE reaction. The sequences derived from these procedures were included in the SeqCalling Assembly process described in preceding paragraphs.

[0688] Exon Linking: The cDNA coding for the CG101190-01 sequence was cloned by the polymerase chain reaction (PCR) using the primers designed based on known cDNA sequences or in silico predictions of the full length or some portion (one or more exons) of the cDNA/protein sequence of the invention. These primers were used to amplify a cDNA from a pool containing expressed human sequences derived from the following tissues: adrenal gland, bone marrow, brain—amygdala, brain—cerebellum, brain—hippocampus, brain—substantia nigra, brain—thalamus, brain—whole, fetal brain, fetal kidney, fetal liver, fetal lung, heart, kidney, lymphoma—Raji, mammary gland, pancreas, pituitary gland, placenta, prostate, salivary gland, skeletal muscle, small intestine, spinal cord, spleen, stomach, testis, thyroid, trachea and uterus.

[0689] Physical Clone: The PCR product derived by exon linking, covering the entire open reading frame, was cloned into the pCR2.1 vector from Invitrogen to provide clones used for expression and screening purposes.

### EXAMPLE Q9

### Quantitative Expression Analysis (RTQ-PCR) of Clones in Various Cells and Tissues

[0690] The quantitative expression of various NOV genes was assessed using microtiter plates containing RNA samples from a variety of normal and pathology-derived cells, cell lines and tissues using real time quantitative PCR (RTQ-PCR) performed on an Applied Biosystems (Foster City, Calif.) ABI PRISM® 7700 or an ABI PRISM® 7900 HT Sequence Detection System.

[0691] RNA integrity of all samples was determined by visual assessment of agarose gel electropherograms using 28S and 18S ribosomal RNA staining intensity ratio as a guide (2:1 to 2.5:1 28s: 18s) and the absence of low molecular weight RNAs (degradation products). Control samples to detect genomic DNA contamination included RTQ-PCR reactions run in the absence of reverse transcriptase using probe and primer sets designed to amplify across the span of a single exon.

[0692] RNA samples were normalized in reference to nucleic acids encoding constitutively expressed genes (i.e., β-actin and GAPDH). Alternatively, non-normalized RNA samples were converted to single strand cDNA (sscDNA) using Superscript II (Invitrogen Corporation, Carlsbad, Calif., Catalog No. 18064-147) and random hexamers according to the manufacturer's instructions. Reactions containing up to 10 μg of total RNA in a volume of 20 μl or were scaled up to contain 50 μg of total RNA in a volume of 100 μl and were incubated for 60 minutes at 42° C. sscDNA samples were then normalized in reference to nucleic acids as described above.

[0693] Probes and primers were designed according to Applied Biosystems Primer Express Software package (version I for Apple Computer's Macintosh Power PC) or a similar algorithm using the target sequence as input. Default reaction condition settings and the following parameters were set before selecting primers: 250 nM primer concentration; 58°-60° C. primer melting temperature (Tm) range; 59° C. primer optimal Tm; 2° C. maximum primer difference (if probe does not have 5′ G, probe Tm must be 10° C. greater than primer Tm; and 75 bp to 100 bp amplicon size. The selected probes and primers were synthesized by Synthegen (Houston, Tex.). Probes were double purified by HPLC to remove uncoupled dye and evaluated by mass spectroscopy to verify coupling of reporter and quencher dyes to the 5′ and 3′ ends of the probe, respectively. Their final concentrations were: 900 nM forward and reverse primers, and 200 nM probe.

[0694] Normalized RNA was spotted in individual wells of a 96 or 384-well PCR plate (Applied Biosystems, Foster City, Calif.). PCR cocktails included a single gene-specific probe and primers set or two multiplexed probe and primers sets. PCR reactions were done using TaqMan® One-Step RT-PCR Master Mix (Applied Biosystems, Catalog No. 4313803) following manufacturer's instructions. Reverse transcription was performed at 48° C. for 30 minutes followed by amplification/PCR cycles: 95° C. 10 min, then 40 cycles at 950 C for 15 seconds, followed by 60° C. for 1 minute. Results were recorded as CT values (cycle at which a given sample crosses a threshold level of fluorescence) and plotted using a log scale, with the difference in RNA concentration between a given sample and the sample with the lowest CT value being represented as 2 to the power of delta CT. The percent relative expression was the reciprocal of the RNA difference multiplied by 100. CT values below 28 indicate high expression, between 28 and 32 indicate moderate expression, between 32 and 35 indicate low expression and above 35 reflect levels of expression that were too low to be measured reliably.

[0695] Normalized sscDNA was analyzed by RTQ-PCR using 1× TaqMan® Universal Master mix (Applied Biosystems; catalog No. 4324020), following the manufacturer's instructions. PCR amplification and analysis were done as described above.

Panels 1, 1.1, 1.2, and 1.3D

[0696] Panels 1, 1.1, 1.2 and 1.3D included 2 control wells (genomic DNA control and chemistry control) and 94 wells of cDNA samples from cultured cell lines and primary normal tissues. Cell lines were derived from carcinomas (ca) including: lung, small cell (s cell var), non small cell (non-s or non-sm); breast; melanoma; colon; prostate; glioma (glio), astrocytoma (astro) and neuroblastoma (neuro); squamous cell (squam); ovarian; liver; renal; gastric and pancreatic from the American Type Culture Collection (ATCC, Bethesda, Md.). Normal tissues were obtained from individual adults or fetuses and included: adult and fetal skeletal muscle, adult and fetal heart, adult and fetal kidney, adult and fetal liver, adult and fetal lung, brain, spleen, bone marrow, lymph node, pancreas, salivary gland, pituitary gland, adrenal gland, spinal cord, thymus, stomach, small intestine, colon, bladder, trachea, breast, ovary, uterus, placenta, prostate, testis and adipose. The following abbreviations are used in reporting the results: metastasis (met); pleural effusion (pl. eff or pl effusion) and * indicates established from metastasis.

General_screening_panel_v1.4, v1.5, v1.6 and v1.7

[0697] Panels 1.4, 1.5, 1.6 and 1.7 were as described for Panels 1, 1.1, 1.2 and 1.3D, above except that normal tissue samples were pooled from 2 to 5 different adults or fetuses.

Panels 2D, 2.2, 2.3 and 2.4

[0698] Panels 2D, 2.2, 2.3 and 2.4 included 2 control wells and 94 wells containing RNA or cDNA from human surgical specimens procured through the National Cancer Institute's Cooperative Human Tissue Network (CHTN) or the National Disease Research Initiative (NDR1), Ardais (Lexington, Mass.) or Clinomics BioSciences (Frederick, Md.). Tissues included human malignancies and in some cases matched adjacent normal tissue (NAT). Information regarding histopathological assessment of tumor differentiation grade as well as the clinical stage of the patient from which samples were obtained was generally available. Normal tissue RNA and cDNA samples were purchased from various commercial sources such as Clontech (Palo Alto, Calif.), Research Genetics and Invitrogen (Carlsbad, Calif.).

HASS Panel v 1.0

[0699] The HASS Panel v1.0 included 93 cDNA samples and two controls including: 81 samples of cultured human cancer cell lines subjected to serum starvation, acidosis and anoxia according to established procedures for various lengths of time; 3 human primary cells; 9 malignant brain cancers (4 medulloblastomas and 5 glioblastomas); and 2 controls. Cancer cell lines (ATCC) were cultured using recommended conditions and included: breast, prostate, bladder, pancreatic and CNS. Primary human cells were obtained from Clonetics (Walkersville, Md.). Malignant brain samples were gifts from the Henry Ford Cancer Center.

ARDAIS Panel v1.0 and v1.1

[0700] The ARDAIS Panel v1.0 and v1.1 included 2 controls and 22 test samples including: human lung adenocarcinomas, lung squamous cell carcinomas, and in some cases matched adjacent normal tissues (NAT) obtained from Ardais (Lexington, Mass.). Unmatched malignant and non-malignant RNA samples from lungs with gross histopathological assessment of tumor differentiation grade and stage and clinical state of the patient were obtained from Ardais.

ARDAIS Prostate v1.0

[0701] ARDAIS Prostate v1.0 panel included 2 controls and 68 test samples of human prostate malignancies and in some cases matched adjacent normal tissues (NAT) obtained from Ardais (Lexington, Mass.). RNA from unmatched malignant and non-malignant prostate samples with gross histopathological assessment of tumor differentiation grade and stage and clinical state of the patient were also obtained from Ardais.

ARDAIS Kidney v1.0

[0702] ARDAIS Kidney v1.0 panel included 2 control wells and 44 test samples of human renal cell carcinoma and in some cases matched adjacent normal tissue (NAT) obtained from Ardais (Lexington, Mass.). RNA from unmatched renal cell carcinoma and normal tissue with gross histopathological assessment of tumor differentiation grade and stage and clinical state of the patient were also obtained from Ardais.

ARDAIS Breast v1.0

[0703] ARDAIS Breast v1.0 panel included 2 control wells and 71 test samples of human breast malignancies and in some cases matched adjacent normal tissue (NAT) obtained from Ardais (Lexington, Mass.). RNA from unmatched malignant and non-malignant breast samples with gross histopathological assessment of tumor differentiation grade and stage and clinical state of the patient were also obtained from Ardais.

Panel 3D, 3.1 and 3.2

[0704] Panels 3D, 3.1, and 3.2 included two controls, 92 cDNA samples of cultured human cancer cell lines and 2 samples of human primary cerebellum. Cell lines (ATCC, National Cancer Institute (NCI), German tumor cell bank) were cultured as recommended and were derived from: squamous cell carcinoma of the tongue, melanoma, sarcoma, leukemia, lymphoma, and epidermoid, bladder, pancreas, kidney, breast, prostate, ovary, uterus, cervix, stomach, colon, lung and CNS carcinomas.

Panels 4D, 4R, and 4.1D

[0705] Panels 4D, 4R, and 4.1D included 2 control wells and 94 test samples of RNA (Panel 4R) or cDNA (Panels 4D and 4.1 D) from human cell lines or tissues related to inflammatory conditions. Controls included total RNA from normal tissues such as colon, lung (Stratagene, La Jolla, Calif.), thymus and kidney (Clontech, Palo Alto, Calif.). Total RNA from cirrhotic and lupus kidney was obtained from BioChain Institute, Inc., (Hayward, Calif.). Crohn's intestinal and ulcerative colitis samples were obtained from the National Disease Research Interchange (NDR1, Philadelphia, Pa.). Cells purchased from Clonetics (Walkersville, Md.) included: astrocytes, lung fibroblasts, dermal fibroblasts, coronary artery smooth muscle cells, small airway epithelium, bronchial epithelium, microvascular dermal endothelial cells, microvascular lung endothelial cells, human pulmonary aortic endothelial cells, and human umbilical vein endothelial. These primary cell types were activated by incubating with various cytokines (IL-1 beta ˜1-5 ng/ml, TNF alpha ˜5-10 ng/ml, IFN gamma ˜20-50 ng/ml, IL-4˜5-10 ng/ml, IL-9˜5-10 ng/ml, IL-13 5-10 ng/ml) or combinations of cytokines as indicated. Starved endothelial cells were cultured in the basal media (Clonetics, Walkersville, Md.) with 0.1% serum.

[0706] Mononuclear cells were prepared from blood donations using Ficoll. LAK cells were cultured in culture media [DMEM, 5% FCS (Hyclone, Logan, Utah), 100 mM non essential amino acids (Gibco/Life Technologies, Rockville, Md.), 1 mM sodium pyruvate (Gibco), mercaptoethanol 5.5×10⁻⁵ M (Gibco), and 10 mM Hepes (Gibco)] and interleukin 2 for 4-6 days. Cells were activated with 10-20 ng/ml PMA and 1-2 μg/ml ionomycin, 5-10 ng/ml IL-12, 20-50 ng/ml IFN gamma or 5-10 ng/ml IL-18 for 6 hours. In some cases, mononuclear cells were cultured for 4-5 days in culture media with ˜5 mg/ml PHA (phytohemagglutinin) or PWM (pokeweed mitogen; Sigma-Aldrich Corp., St. Louis, Mo.). Samples were taken at 24, 48 and 72 hours for RNA preparation. MLR (mixed lymphocyte reaction) samples were obtained by taking blood from two donors, isolating the mononuclear cells using Ficoll and mixing them 1:1 at a final concentration of ˜2×10⁶ cells/ml in culture media. The MLR samples were taken at various time points from 1-7 days for RNA preparation.

[0707] Monocytes were isolated from mononuclear cells using CD14 Miltenyi Beads, +ve VS selection columns and a Vario Magnet (Miltenyi Biotec, Auburn, Calif.) according to the manufacturer's instructions. Monocytes were differentiated into dendritic cells by culturing in culture media with 50 ng/ml GMCSF and 5 ng/ml IL-4 for 5-7 days. Macrophages were prepared by culturing monocytes for 5-7 days in culture media with ˜50 ng/ml 10% type AB Human Serum (Life technologies, Rockville, Md.) or MCSF (Macrophage colony stimulating factor; R&D, Minneapolis, Minn.). Monocytes, macrophages and dendritic cells were stimulated for 6 or 12-14 hours with 100 ng/ml lipopolysaccharide (LPS). Dendritic cells were also stimulated with 10 μg/ml anti-CD40 monoclonal antibody (Pharmingen, San Diego, Calif.) for 6 or 12-14 hours.

[0708] CD4+ lymphocytes, CD8+ lymphocytes and NK cells were also isolated from mononuclear cells using CD4, CD8 and CD56 Miltenyi beads, positive VS selection columns and a Vario Magnet (Miltenyi Biotec, Auburn, Calif.) according to the manufacturer's instructions. CD45+RA and CD45+RO CD4+ lymphocytes were isolated by depleting mononuclear cells of CD8+, CD56+, CD14+ and CD19+cells using CD8, CD56, CD14 and CD19 Miltenyi beads and positive selection. CD45RO Miltenyi beads were then used to separate the CD45+RO CD4+ lymphocytes from CD45+RA CD4+ lymphocytes. CD45+RA CD4+, CD45+RO CD4+ and CD8+ lymphocytes were cultured in culture media at 10⁶ cells/ml in culture plates precoated overnight with 0.5 mg/ml anti-CD28 (Pharmingen, San Diego, Calif.) and 3 μg/ml anti-CD3 (OKT3, ATCC) in PBS. After 6 and 24 hours, the cells were harvested for RNA preparation. To prepare chronically activated CD8+ lymphocytes, isolated CD8+ lymphocytes were activated for 4 days on anti-CD28, anti-CD3 coated plates and then harvested and expanded in culture media with IL-2 (1 ng/ml). These CD8+ cells were activated again with plate bound anti-CD3 and anti-CD28 for 4 days and expanded as described above. RNA was isolated 6 and 24 hours after the second activation and after 4 days of the second expansion culture. Isolated NK cells were cultured in culture media with 1 ng/ml IL-2 for 4-6 days before RNA was prepared.

[0709] B cells were prepared from minced and sieved tonsil tissue (NDR1). Tonsil cells were pelleted and resupended at 10⁶ cells/ml in culture media. Cells were activated using 5 μg/ml PWM (Sigma-Aldrich Corp., St. Louis, Mo.) or ˜0 μg/ml anti-CD40 (Pharmingen, San Diego, Calif.) and 5-10 ng/ml IL-4. Cells were harvested for RNA preparation after 24, 48 and 72 hours.

[0710] To prepare primary and secondary Th1/Th2 and Tr1 cells, umbilical cord blood CD4+ lymphocytes (Poietic Systems, German Town, Md.) were cultured at 10⁵-10⁶ cells/ml in culture media with IL-2 (4 ng/ml) in 6-well Falcon plates (precoated overnight with 10 μg/ml anti-CD28 (Pharmingen) and 2 μg/ml anti-CD3 (OKT3; ATCC) then washed twice with PBS).

[0711] To stimulate Th1 phenotype differentiation, IL-12 (5 ng/ml) and anti-IL4 (1 μg/ml) were used; for Th2 phenotype differentiation, IL-4 (5 ng/ml) and anti-IFN gamma (1 μg/ml) were used; and for Tr1 phenotype differentiation, IL-10 (5 ng/ml) was used. After 4-5 days, the activated Th1, Th2 and Tr1 lymphocytes were washed once with DMEM and expanded for 4-7 days in culture media with IL-2 (i ng/ml). Activated Th1, Th2 and Tr1 lymphocytes were re-stimulated for 5 days with anti-CD28/CD3 and cytokines as described above with the addition of anti-CD95L (1 μg/ml) to prevent apoptosis. After 4-5 days, the Th1, Th2 and Trl lymphocytes were washed and expanded in culture media with IL-2 for 4-7 days. Activated Th1 and Th2 lymphocytes were maintained for a maximum of three cycles. RNA was prepared from primary and secondary Th1, Th2 and Tr1 after 6 and 24 hours following the second and third activations with plate-bound anti-CD3 and anti-CD28 mAbs and 4 days into the second and third expansion cultures.

[0712] Leukocyte cells lines Ramos, EOL-1, KU-812 were obtained from the ATCC. EOL-1 cells were further differentiated by culturing in culture media at 5×1 05 cells/ml with 0.1 mM dbcAMP for 8 days, changing the media every 3 days and adjusting the cell concentration to 5×10⁵ cells/ml. RNA was prepared from resting cells or cells activated with PMA (10 ng/ml) and ionomycin (1 μg/ml) for 6 and 14 hours. RNA was prepared from resting CCD 1106 keratinocyte cell line (ATCC) or from cells activated with ˜5 ng/ml TNF alpha and 1 ng/ml IL-1 beta. RNA was prepared from resting NCI-H292, airway epithelial tumor cell line (ATCC) or from cells activated for 6 and 14 hours in culture media with 5 ng/ml IL4, 5 ng/ml IL-9, 5 ng/ml IL-13, and 25 ng/ml IFN gamma.

[0713] RNA was prepared by lysing approximately 10⁷ cells/ml using Trizol (Gibco BRL) then adding 1/10 volume of bromochloropropane (Molecular Research Corporation, Cincinnati, Ohio), vortexing, incubating for 10 minutes at room temperature and then spinning at 14,000 rpm in a Sorvall SS34 rotor. The aqueous phase was placed in a 15 ml Falcon Tube and an equal volume of isopropanol was added and left at −20° C. overnight. The precipitated RNA was spun down at 9,000 rpm for 15 min and washed in 70% ethanol. The pellet was redissolved in 300 μl of RNAse-free water with 35 ml buffer (Promega, Madison, Wis.) 5 μl DTT, 7 μl RNAsin and 8 μl DNAse and incubated at 37° C. for 30 minutes to remove contaminating genomic DNA, extracted once with phenol chloroform and re-precipitated with 1/10 volume of 3 M sodium acetate and 2 volumes of 100% ethanol. The RNA was spun down, placed in RNAse free water and stored at −80° C.

AI_comprehensive panel_v1.0

[0714] Autoimmunity (AI) comprehensive panel v1.0 included two controls and 89 cDNA test samples isolated from male (M) and female (F) surgical and postmortem human tissues that were obtained from the Backus Hospital and Clinomics (Frederick, Md.). Tissue samples included: normal, adjacent (Adj); matched normal adjacent (match control); joint tissues (synovial (Syn) fluid, synovium, bone and cartilage, osteoarthritis (OA), rheumatoid arthritis (RA)); psoriatic; ulcerative colitis colon; Crohns disease colon; and emphysmatic, asthmatic, allergic and chronic obstructive pulmonary disease (COPD) lung.

Pulmonary and General inflammation (PGI) panel v1.0

[0715] Pulmonary and General inflammation (PGI) panel v1.0 included two controls and 39 test samples isolated as surgical or postmortem samples. Tissue samples include: five normal lung samples obtained from Maryland Brain and Tissue Bank, University of Maryland (Baltimore, Md.), International Bioresource systems, IBS (Tuscon, Ariz.), and Asterand (Detroit, Mich.), five normal adjacent intestine tissues (NAT) from Ardais (Lexington, Mass.), ulcerative colitis samples (UC) from Ardais (Lexington, Mass.); Crohns disease colon from NDR1, National Disease Research Interchange (Philadelphia, Pa.); emphysematous tissue samples from Ardais (Lexington, Mass.) and Genomic Collaborative Inc. (Cambridge, Mass.), asthmatic tissue from Maryland Brain and Tissue Bank, University of Maryland (Baltimore, Md.) and Genomic Collaborative Inc (Cambridge, Mass.) and fibrotic tissue from Ardais (Lexinton, Mass.) and Genomic Collaborative (Cambridge, Mass.).

Cellular OA/RA Panel

[0716] Cellular OA.RA panel includes 2 control wells and 35 test samples comprised of cDNA generated from total RNA isolated from human cell lines or primary cells representative of the human joint and its inflammatory condition. Cell types included normal human osteoblasts (Nhost) from Clonetics (Cambrex, East Rutherford, N J), human chondrosarcoma SW1353 cells from ATCC (Manossas, Va.)), human fibroblast-like synoviocytes from Cell Applications, Inc. (San Diego, Calif.) and MH7A cell line (a rheumatoid fibroblast-like synoviocytes transformed with SV40 T antigen) from Riken Cell bank (Tsukuba Science City, Japan). These cell types were activated by incubating with various cytokines (IL-1 beta 1-10 ng/ml, TNF alpha ˜5-50 ng/ml, or prostaglandin E2 for Nhost cells) for 1, 6, 18 or 24 h. All these cells were starved for at least 5 h and cultured in their corresponding basal medium with ˜0.1 to 1% FBS.

Minitissue OA/RA Panel

[0717] The OA/RA mini panel includes two control wells and 31 test samples comprised of cDNA generated from total RNA isolated from surgical and postmortem human tissues obtained from the University of Calgary (Alberta, Canada), NDR1 (Philadelphia, Pa.), and Ardais Corporation (Lexington, Mass.). Joint tissue samples include synovium, bone and cartilage from osteoarthritic and rheumatoid arthritis patients undergoing reconstructive knee surgery, as well as, normal synovium samples (RNA and tissue). Visceral normal tissues were pooled from 2-5 different adults and included adrenal gland, heart, kidney, brain, colon, lung, stomach, small intestine, skeletal muscle, and ovary.

AI.05 Chondrosarcoma

[0718] AI.05 chondrosarcoma plates included SW1353 cells (ATCC) subjected to serum starvation and treated for 6 and 18 h with cytokines that are known to induce MMP (1, 3 and 13) synthesis (e.g. IL1beta). These treatments included: IL-1beta (10 ng/ml), IL-1beta+TNF-alpha (50 ng/ml), IL-1 beta+Oncostatin (50 ng/ml) and PMA (100 ng/ml). Supernatants were collected and analyzed for MMP 1, 3 and 13 production. RNA was prepared from these samples using standard procedures.

Panels 5D and 51

[0719] Panel 5D and 5I included two controls and cDNAs isolated from human tissues, human pancreatic islets cells, cell lines, metabolic tissues obtained from patients enrolled in the Gestational Diabetes study (described below), and cells from different stages of adipocyte differentiation, including differentiated (AD), midway differentiated (AM), and undifferentiated (U; human mesenchymal stem cells).

[0720] Gestational Diabetes study subjects were young (18-40 years), otherwise healthy women with and without gestational diabetes undergoing routine (elective) Caesarean section. Uterine wall smooth muscle (UT), visceral (Vis) adipose, skeletal muscle (SK), placenta (P1) greater omentum adipose (GO Adipose) and subcutaneous (SubQ) adipose samples (less than 1 cc) were collected, rinsed in sterile saline, blotted and flash frozen in liquid nitrogen. Patients included: Patient 2, an overweight diabetic Hispanic not on insulin; Patient 7-9, obese non-diabetic Caucasians with body mass index (BMI) greater than 30; Patient 10, an overweight diabetic Hispanic, on insulin; Patient 11, an overweight nondiabetic African American; and Patient 12, a diabetic Hispanic on insulin.

[0721] Differentiated adipocytes were obtained from induced donor progenitor cells (Clonetics, Walkersville, Md.). Differentiated human mesenchymal stem cells (HuMSCs) were prepared as described in Mark F. Pittenger, et al., Multilineage Potential of Adult Human Mesenchymal Stem Cells Science Apr. 2 1999: 143-147. mRNA was isolated and sscDNA was produced from Trizol lysates or frozen pellets. Human cell lines (ATCC, NCI or German tumor cell bank) included: kidney proximal convoluted tubule, uterine smooth muscle cells, small intestine, liver HepG2 cancer cells, heart primary stromal cells and adrenal cortical adenoma cells. Cells were cultured, RNA extracted and sscDNA was produced using standard procedures.

[0722] Panel 5I also contains pancreatic islets (Diabetes Research Institute at the University of Miami School of Medicine).

Human Metabolic RTQ-PCR Panel

[0723] Human Metabolic RTQ-PCR Panel included two controls (genomic DNA control and chemistry control) and 211 cDNAs isolated from human tissues and cell lines relevant to metabolic diseases. This panel identifies genes that play a role in the etiology and pathogenesis of obesity and/or diabetes. Metabolic tissues including placenta (P1), uterine wall smooth muscle (Ut), visceral adipose, skeletal muscle (Sk) and subcutaneous (SubQ) adipose were obtained from the Gestational Diabetes study (described above). Included in the panel are: Patients 7 and 8, obese non-diabetic Caucasians; Patient 12 a diabetic Caucasian with unknown BMI, on insulin (treated); Patient 13, an overweight diabetic Caucasian, not on insulin (untreated); Patient 15, an obese, untreated, diabetic Caucasian; Patient 17 and 25, untreated diabetic Caucasians of normal weight; Patient 18, an obese, untreated, diabetic Hispanic; Patient 19, a non-diabetic Caucasian of normal weight; Patient 20, an overweight, treated diabetic Caucasian; Patient 21 and 23, overweight non-diabetic Caucasians; Patient 22, a treated diabetic Caucasian of normal weight; Patient 23, an overweight non-diabetic Caucasian; and Patients 26 and 27, obese, treated, diabetic Caucasians.

[0724] Total RNA was isolated from metabolic tissues including: hypothalamus, liver, pancreas, pancreatic islets, small intestine, psoas muscle, diaphragm muscle, visceral (Vis) adipose, subcutaneous (SubQ) adipose and greater omentum (Go) from 12 Type II diabetic (Diab) patients and 12 non diabetic (Norm) at autopsy. Control diabetic and non-diabetic subjects were matched where possible for: age; sex, male (M); female (F); ethnicity, Caucasian (CC); Hispanic (HI); African American (AA); Asian (AS); and BMI, 20-25 (Low BM), 26-30 (Med BM) or overweight (Overwt), BMI greater than 30 (Hi BMI) (obese).

[0725] RNA was extracted and ss cDNA was produced from cell lines (ATCC) by standard methods.

CNS Panels

[0726] CNS Panels CNSD.01, CNS Neurodegeneration V1.0 and CNS Neurodegeneration V2.0 included two controls and 46 to 94 test cDNA samples isolated from postmortem human brain tissue obtained from the Harvard Brain Tissue Resource Center (McLean Hospital). Brains were removed from calvaria of donors between 4 and 24 hours after death, and frozen at −80° C. in liquid nitrogen vapor.

Panel CNSD.01

[0727] Panel CNSD.01 included two specimens each from: Alzheimer's disease, Parkinson's disease, Huntington's disease, Progressive Supernuclear Palsy (PSP), Depression, and normal controls. Collected tissues included: cingulate gyrus (Cing Gyr), temporal pole (Temp Pole), globus palladus (Glob palladus), substantia nigra (Sub Nigra), primary motor strip (Brodman Area 4), parietal cortex (Brodman Area 7), prefrontal cortex (Brodman Area 9), and occipital cortex (Brodman area 17). Not all brain regions are represented in all cases.

Panel CNS Neurodegeneration V1.0

[0728] The CNS Neurodegeneration V1.0 panel included: six Alzheimer's disease (AD) brains and eight normals which included no dementia and no Alzheimer's like pathology (control) or no dementia but evidence of severe Alzheimer's like pathology (Control Path), specifically senile plaque load rated as level 3 on a scale of 0-3; 0 no evidence of plaques, 3 severe AD senile plaque load. Tissues collected included: hippocampus, temporal cortex (Brodman Area 21), parietal cortex (Brodman area 7), occipital cortex (Brodman area 17) superior temporal cortex (Sup Temporal Ctx) and inferior temporal cortex (Inf Temproal Ctx).

[0729] Gene expression was analyzed after normalization using a scaling factor calculated by subtracting the Well mean (CT average for the specific tissue) from the Grand mean (average CT value for all wells across all runs). The scaled CT value is the result of the raw CT value plus the scaling factor.

Panel CNS Neurodegeneration V2.0

[0730] The CNS Neurodegeneration V2.0 panel included sixteen cases of Alzheimer's disease (AD) and twenty-nine normal controls (no evidence of dementia prior to death) including fourteen controls (Control) with no dementia and no Alzheimer's like pathology and fifteen controls with no dementia but evidence of severe Alzheimer's like pathology (AH3), specifically senile plaque load rated as level 3 on a scale of 0-3; 0 no evidence of plaques, 3 severe AD senile plaque load. Tissues from the temporal cortex (Brodman Area 21) included the inferior and superior temporal cortex that was pooled from a given individual (Inf & Sup Temp Ctx Pool).

### EXAMPLE Q10

### PathCalling® Technology

[0731] The sequence of NOVX was derived by laboratory screening of cDNA library by the two-hybrid approach. cDNA fragments covering either the full length of the DNA sequence, or part of the sequence, or both, were sequenced. In silico prediction was based on sequences available in CuraGen Corporation's proprietary sequence databases or in the public human sequence databases, and provided either the full-length DNA sequence, or some portion thereof.

[0732] The laboratory screening was performed using the methods that follow. cDNA libraries were derived from various human samples representing multiple tissue types, normal and diseased states, physiological states, and developmental states from different donors. Samples were obtained as whole tissue, primary cells or tissue cultured primary cells or cell lines. Cells and cell lines may have been treated with biological or chemical agents that regulate gene expression, for example, growth factors, chemokines or steroids. The cDNA thus derived was then directionally cloned into the appropriate two-hybrid vector (Gal4-activation domain (Gal4-AD) fusion). Such cDNA libraries as well as commercially available cDNA libraries from Clontech (Palo Alto, Calif.) were then transferred from E. coli into a CuraGen Corporation proprietary yeast strain (disclosed in U.S. Pat. Nos. 6,057,101 and 6,083,693, incorporated herein by reference in their entireties).

[0733] Gal4-binding domain (Gal4-BD) fusions of a CuraGen Corportion proprietary library of human sequences was used to screen multiple Gal4-AD fusion cDNA libraries resulting in the selection of yeast hybrid diploids in each of which the Gal4-AD fusion contains an individual cDNA. Each sample was amplified using the polymerase chain reaction (PCR) using non-specific primers at the cDNA insert boundaries. Such PCR product was sequenced; sequence traces were evaluated manually and edited for corrections if appropriate. cDNA sequences from all samples were assembled together, sometimes including public human sequences, using bioinformatic programs to produce a consensus sequence for each assembly. Each assembly is included in CuraGen Corporation's database. Sequences were included as components for assembly when the extent of identity with another component was at least 95% over 50 bp. Each assembly represents a gene or portion thereof and includes information on variants, such as splice forms single nucleotide polymorphisms (SNPs), insertions, deletions and other sequence variations.

[0734] Physical clone: the cDNA fragment derived by the screening procedure, covering the entire open reading frame is, as a recombinant DNA, cloned into pACT2 plasmid (Clontech) used to make the cDNA library. The recombinant plasmid is inserted into the host and selected by the yeast hybrid diploid generated during the screening procedure by the mating of both CuraGen Corporation proprietary yeast strains N106′ and YULH (U.S. Pat. Nos. 6,057,101 and 6,083,693).

### Other Embodiments

[0735] While the invention has been described in conjunction with the detailed description thereof, the foregoing description is intended to illustrate and not limit the scope of the invention, which is defined by the scope of the appended claims. Other aspects, advantages, and modifications are within the scope of the following claims.

The application's sequence listing, which the Patent Office published only in electronic form, follows.

SEQUENCE LISTING (221 sequences)

SEQ ID NO: 1 - DNA, 2070 bp, Homo sapiens
  CDS (119)..(1984)
gaacacaaacttgctggcgggaagagcccggaaagaaacctgtggatctcccttcgagatcatccaaagagaagaaaggtgacctcacattcgtgccccttagcagcactctgcagaaatgcctcctcagctgcaaaacggcctgaacctctcggccaaagttgtccagggaagcctggacagcctgccccaggcagtgagggagtttctcgagaataacgctgagctgtgtcagcctgatcacatccacatctgtgacggctctgaggaggagaatgggcggcttctgggccagatggaggaagagggcatcctcaggcggctgaagaagtatgacaactgctggttggctctcactgaccccagggatgtggccaggatcgaaagcaagacggttatcgtcacccaagagcaaagagacacagtgcccatccccaaaacaggcctcagccagctcggtcgctggatgtcagaggaggattttgagaaagcgttcaatgccaggttcccagggtgcatgaaaggtcgcaccatgtacgtcatcccattcagcatggggccgctgggctcacctctgtcgaagatcggcatcgagctgacggattcgccctacgtggtggccagcatgcggatcatgacgcggatgggcacgcccgtcctggaagcactgggcgatggggagtttgtcaaatgcctccattctgtggggtgccctctgcctttacaaaagcctttggtcaacaactggccctgcaacccggagctgacgctcatcgcccacctgcctgaccgcagagagatcatctcctttggcagtgggtacggcgggaactcgctgctcgggaagaagtgctttgctctcaggatggccagccggctggccaaggaggaagggtggctggcagagcacatgctgattctgggtataaccaaccctgagggtgagaagaagtacctggcggccgcatttcccagcgcctgcgggaagaccaacctggccatgatgaaccccagcctccccgggtggaaggttgagtgcgtcggggatgacattgcctggatgaagtttgacgcacaaggtcatttaagggccatcaacccagaaaatggctttttcggtgtcgctcctgggacttcagtgaagaccaaccccaatgccatcaagaccatccagaagaacacaatctttaccaatgtggccgagaccagcgacgggggcgtttactgggaaggtattgatgagccgctagcttcaggcgtcaccatcacgtcctggaagaataaggagtggagctcagaggatggggaaccttgtgcccaccccaactcgaggttctgcacccctgccagccagtgccccatcattgatgctgcctgggagtctccggaaggtgttcccattgaaggcattatctttggaggccgtagacctgctggtgtccctctagtctatgaagctctcagctggcaacatggagtctttgtgggggcggccatgagatcagaggccacagcggctgcagaacataaaggcaaaatcatcatgcatgacccctttgccatgcggcccttctttggctacaacttcggcaaatacctggcccactggcttagcatggcccagcacccagcagccaaactgcccaagatcttccatgtcaactggttccggaaggacaaggaaggcaaattcctctggccaggctttggagagaactccagggtgctggagtggatgttcaaccggatcgatggaaaagccagcaccaagctcacgcccataggctacatccccaaggaggatgccctgaacctgaaaggcctggggcacatcaacatgatggagcttttcagcatctccaaggaattctgggagaaggaggtggaagacatcgagaagtatctggaggatcaagtcaatgccgacctcccctgtgaaatcgagagagagatccttgccttgaagcaaagaataagccagatgtaatcagggcctgagtgctttacctttaaaatcattccctttcccatccataaggtgcagtaggagcaagagagggcaagtgttcc

SEQ ID NO: 2 - protein, 622 aa, Homo sapiens [sequence omitted]

SEQ ID NO: 3 - DNA, 1888 bp, Homo sapiens
  CDS (2)..(1888)
caccggatccaccatgcctcctcagctgcaaaacggcctgaacctctcggccaaagttgtccagggaagcctggacagcctgccccaggcagtgagggagtttctcgagaataacgctgagctgtgtcagcctgatcacatccacatctgtgacggctctgaggaggagaatgggcggcttctgggccagatggaggaagagggcatcctcaggcgactgaagaagtatgacaactgctggttggctctcactgaccccagggatgtggccaggatcgaaagcaagacggttatcgtcacccaagagcaaagagacacagtgcccatccccaaaacaggcctcagccagctcggtcgctggatgtcagaggaggattttgagaaagcgttcaatgccaggttcccagggtgcatgaaaggtcgcaccatgtacgtcatcccattcagcatggggccgctgggctcacctctgtcgaagatcggcatcgagctgacggattcgccctacgtggtggccagcatgcggatcatgacgcggatgggcacgcccgtcctggaagcactgggcgatggggagtttgtcaaatgcctccattctgtggggtgccctctgcctttacaaaagcctttggtcaacaactggccctgcaacccggagctgacgctcatcgcccacctgcctgaccgcagagagatcatctcctttggcagtgggtacggcgggaactcgctgctcgggaagaagtgctttgctctcaggatggccagccggctggccaaggaggaagggtggctggcagagcacatgctgattctgggtataaccaaccctgagggtgagaagaagtacctggcggccgcatttcccagcgcctgcgggaagaccaacctggccatgatgaaccccagcctccccgggtggaaggttgagtgcgtcggggatgacattgcctggatgaagtttgacgcacaaggtcatttaagggccatcaacccagaaaatggctttttcggtgtcgctcctgggacttcagtgaagaccaaccccaatgccatcaagaccatccagaagaacacaatctttaccaatgtggccgagaccagcgacgggggcgtttactgggaaggtattgatgagccgctagcttcaggcgtcaccatcacgtcctggaagaataaggagtggagctcagaggatggggaaccttgtgcccaccccaactcgaggttctgcacccctgccagccagtgccccatcattgatgctgcctgggagtctccggaaggtgttcccattgaaggcattatctttggaggccgtagacctgctggtgtccctctagtctatgaagctctcagctggcaacatggagtctttgtgggggcggccatgagatcagaggccacagcggctgcagaacataaaggcaaaatcatcatgcatgacccctttgccatgcggcccttctttggctacaacttcggcaaatacctggcccactggcttagcatggcccagcacccagcagccaaactgcccaagatcttccatgtcaactggttccggaaggacaaggaaggcaaattcctctggccaggctttggagagaactccagggtgctggagtggatgttcaaccggatcgatggaaaagccagcaccaagctcacgcccataggctacatccccaaggaggatgccctgaacctgaaaggcctggggcacatcaacatgatggagcttttcagcatctccaaggaattctgggagaaggaggtggaagacatcgagaagtatctggaggatcaagtcaatgccgacctcccctgtgaaatcgagagagagatccttgccttgaagcaaagaataagccagatggtcgacggc

SEQ ID NO: 4 - protein, 629 aa, Homo sapiens
TGSTMPPQLQNGLNLSAKVVQGSLDSLPQAVREFLENNAELCQPDHIHICDGSEEENGRLLGQMEEEGILRRLKKYDNCWLALTDPRDVARIESKTVIVTQEQRDTVPIPKTGLSQLGRWMSEEDFEKAFNARFPGCMKGRTMYVIPFSMGPLGSPLSKIGIELTDSPYVVASMRIMTRMGTPVLEALGDGEFVKCLHSVGCPLPLQKPLVNNWPCNPELTLIAHLPDRREIISFGSGYGGNSLLGKKCFALRMASRLAKEEGWLAEHMLILGITNPEGEKKYLAAAFPSACGKTNLAMMNPSLPGWKVECVGDDIAWMKFDAQGHLRAINPENGFFGVAPGTSVKTNPNAIKTIQKNTIFTNVAETSDGGVYWEGIDEPLASGVTITSWKNKEWSSEDGEPCAHPNSRFCTPASQCPIIDAAWESPEGVPIEGIIFGGRRPAGVPLVYEALSWQHGVFVGAAMRSEATAAAEHKGKIIMHDPFAMRPFFGYNFGKYLAHWLSMAQHPAAKLPKIFHVNWFRKDKEGKFLWPGFGENSRVLEWMFNRIDGKASTKLTPIGYIPKEDALNLKGLGHINMMELFSISKEFWEKEVEDIEKYLEDQVNADLPCEIEREILALKQRISQMVDG

SEQ ID NO: 5 - DNA, 1801 bp, Homo sapiens
  CDS (2)..(1801)
caccggatccgagtttctcgagaataacgctgagctgtgtcagcctgatcacatccacatctgtgacggctctgaggaggagaatgggcggcttctgggccagatggaggaagagggcatcctcaggcgactgaagaagtatgacaactgctggttggctctcactgaccccagggatgtggccaggatcgaaagcaagacggttatcgtcacccaagagcaaagagacacagtgcccatccccaaaacaggcctcagccagctcggtcgctggatgtcagaggaggattttgagaaagcgttcaatgccaggttcccagggtgcatgaaaggtcgcaccatgtacgtcatcccattcagcatggggccgctgggctcacctctgtcgaagatcggcatcgagctgacggattcgccctacgtggtggccagcatgcggatcatgacgcggatgggcacgcccgtcctggaagcactgggcgatggggagtttgtcaaatgcctccattctgtggggtgccctctgcctttacaaaagcctttggtcaacaactggccctgcaacccggagctgacgctcatcgcccacctgcctgaccgcagagagatcatctcctttggcagtgggtacggcgggaactcgctgctcgggaagaagtgctttgctctcaggatggccagccggctggccaaggaggaagggtggctggcagagcacatgctgattctgggtataaccaaccctgagggtgagaagaagtacctggcggccgcatttcccagcgcctgcgggaagaccaacctggccatgatgaaccccagcctccccgggtggaaggttgagtgcgtcggggatgacattgcctggatgaagtttgacgcacaaggtcatttaagggccatcaacccagaaaatggctttttcggtgtcgctcctgggacttcagtgaagaccaaccccaatgccatcaagaccatccagaagaacacaatctttaccaatgtggccgagaccagcgacgggggcgtttactgggaaggtattgatgagccgctagcttcaggcgtcaccatcacgtcctggaagaataaggagtggagctcagaggatggggaaccttgtgcccaccccaactcgaggttctgcacccctgccagccagtgccccatcattgatgctgcctgggagtctccggaaggtgttcccattgaaggcattatctttggaggccgtagacctgctggtgtccctctagtctatgaagctctcagctggcaacatggagtctttgtgggggcggccatgagatcagaggccacagcggctgcagaacataaaggcaaaatcatcatgcatgacccctttgccatgcggcccttctttggctacaacttcggcaaatacctggcccactggcttagcatggcccagcacccagcagccaaactgcccaagatcttccatgtcaactggttccggaaggacaaggaaggcaaattcctctggccaggctttggagagaactccagggtgctggagtggatgttcaaccggatcgatggaaaagccagcaccaagctcacgcccataggctacatccccaaggaggatgccctgaacctgaaaggcctggggcacatcaacatgatggagcttttcagcatctccaaggaattctgggagaaggaggtggaagacatcgagaagtatctggaggatcaagtcaatgccgacctcccctgtgaaatcgagagagagatccttgccttgaagcaaagaataagccagatggtcgacggc

SEQ ID NO: 6 - protein, 600 aa, Homo sapiens
TGSEFLENNAELCQPDHIHICDGSEEENGRLLGQMEEEGILRRLKKYDNCWLALTDPRDVARIESKTVIVTQEQRDTVPIPKTGLSQLGRWMSEEDFEKAFNARFPGCMKGRTMYVIPFSMGPLGSPLSKIGIELTDSPYVVASMRIMTRMGTPVLEALGDGEFVKCLHSVGCPLPLQKPLVNNWPCNPELTLIAHLPDRREIISFGSGYGGNSLLGKKCFALRMASRLAKEEGWLAEHMLILGITNPEGEKKYLAAAFPSACGKTNLAMMNPSLPGWKVECVGDDIAWMKFDAQGHLRAINPENGFFGVAPGTSVKTNPNAIKTIQKNTIFTNVAETSDGGVYWEGIDEPLASGVTITSWKNKEWSSEDGEPCAHPNSRFCTPASQCPIIDAAWESPEGVPIEGIIFGGRRPAGVPLVYEALSWQHGVFVGAAMRSEATAAAEHKGKIIMHDPFAMRPFFGYNFGKYLAHWLSMAQHPAAKLPKIFHVNWFRKDKEGKFLWPGFGENSRVLEWMFNRIDGKASTKLTPIGYIPKEDALNLKGLGHINMMELFSISKEFWEKEVEDIEKYLEDQVNADLPCEIEREILALKQRISQMVDG

SEQ ID NO: 7 - DNA, 2078 bp, Homo sapiens
  CDS (80)..(1948)
ggcacgagggcctgtcgccgcgggagcagccgctatctctgtgtgtccgcgtgtgcgcccggtccccgcctgccgcaccatggagagctaccacaagcctgaccagcagaagctgcaggccttgaaggacacggccaaccgcctacgtatcagctccatccaggccaccactgcggcgggctctggccaccccacgtcatgctgcagcgccgcagagatcatggctgtcctctttttccacaccatgcgctacaagtcccaggacccccggaatccgcacaatgaccgctttgtgctctccaagggccatgcagctcccatcctctacgcggtctgggctgaagctggtttcctggccgaggcggagctgctgaacctgaggaagatcagctccgacttggacgggcacccggtcccgaaacaagctttcaccgacgtggccactggctccctgggccagggcctcggggccgcttgtgggatggcctacaccggcaaatacttcgacaaggccagctaccgagtctattgcttgctgggagatggggagctgtcagagggctctgtatgggaggccatggccttcgccagcatctataagctggacaaccttgtggccattctagacatcaatcgcctgggccagagtgacccggccccgctgcagcaccagatggacatctaccagaagcggtgcgaggccttcggttggcatgccatcatcgtggatggacacagcgtggaggagctgtgcaaggcctttggccaggccaagcaccagccaacagccatcattgccaagaccttcaagggccgagggatcacgggggtagaagataaggagtcttggcatgggaagcccctccccaaaaacatggctgagcagatcatccaggagatctacagccagatccagagcaaaaagaagatcctggcaacccctccacaggaggacgcaccctcagtggacattgccaacatccgcatgcccagcctgcccagctacaaagttggggacaagatagccacccgcaaggcctacgggcaggcactggccaagctgggccatgccagtgaccgcatcatcgccctggatggggacaccaaaaattccaccttctcggagatcttcaaaaaggagcacccggaccgcttcatcgagtgctacattgccgagcagaacatggtgagcatcgcggtgggctgtgccacccgcaacaggacggtgcccttctgcagcacttttgcagccttcttcacgcgggcctttgaccagattcgcatggccgccatctccgagagcaacatcaacctctgcggctcccactgcggcgtttccatcggggaagacgggccctcccagatggccctagaagatctggctatgtttcggtcagtccccacatcaactgtcttttacccaagtgatggcgttgctacagagaaggcagtggaactagccgccaatacaaagggtatctgcttcatccggaccagccgcccagaaaatgccatcatctataacaacaatgaggacttccaggtcggacaagccaaggtggtcctgaagagcaaggatgaccaggtgaccgttatcggggctggggtgaccctgcacgaggccttggccgctgccgaactgctgaagaaagaaaagatcaacatccgcgtgctggaccccttcaccatcaagcccctggacagaaaactcattctcgacagcgctcgtgccaccaagggcaggatcctcaccgtggaggaccattattatgaaggtggcattggtgaggctgtgtccagtgcagtagtgggcgagcctggcatcactgtcacccacctggcagttaaccgggtaccaagaagtgggaagccagctgagctgctgaagatgtttggtatcgacagggatgccattgcacaagctgtgaggggcctcatcaccaaggcctagggcgggtatgaagtgtggggcgggggtctatacattcctgagattctgggaaaggtgctcaaagatgtactgagaggaggggtaaatatatgttttgagaaaaatgaaaaaaaaaaaaaaaaaaaaa

SEQ ID NO: 8 - protein, 623 aa, Homo sapiens
MESYHKPDQQKLQALKDTANRLRISSIQATTAAGSGHPTSCCSAAEIMAVLFFHTMRYKSQDPRNPHNDRFVLSKGHAAPILYAVWAEAGFLAEAELLNLRKISSDLDGHPVPKQAFTDVATGSLGQGLGAACGMAYTGKYFDKASYRVYCLLGDGELSEGSVWEAMAFASIYKLDNLVAILDINRLGQSDPAPLQHQMDIYQKRCEAFGWHAIIVDGHSVEELCKAFGQAKHQPTAIIAKTFKGRGITGVEDKESWHGKPLPKNMAEQIIQEIYSQIQSKKKILATPPQEDAPSVDIANIRMPSLPSYKVGDKIATRKAYGQALAKLGHASDRIIALDGDTKNSTFSEIFKKEHPDRFIECYIAEQNMVSIAVGCATRNRTVPFCSTFAAFFTRAFDQIRMAAISESNINLCGSHCGVSIGEDGPSQMALEDLAMFRSVPTSTVFYPSDGVATEKAVELAANTKGICFIRTSRPENAIIYNNNEDFQVGQAKVVLKSKDDQVTVIGAGVTLHEALAAAELLKKEKINIRVLDPFTIKPLDRKLILDSARATKGRILTVEDHYYEGGIGEAVSSAVVGEPGITVTHLAVNRVPRSGKPAELLKMFGIDRDAIAQAVRGLITKA

SEQ ID NO: 9 - DNA, 1927 bp, Homo sapiens
  CDS (2)..(1885)
tcatcatcaccaccatcacgagagctaccacaagcctgaccagcagaagctgcaggccttgaaggacacggccaaccgcctacgtatcagctccatccaggccaccactgcggcgggctctggccaccccacgtcatgctgcagcgccgcagagatcatggctgtcctctttttccacaccatgcgctacaagtcccaggacccccggaatccgcacaatgaccgctttgtgctctccaagggccatgcagctcccatcctctacgcggtctgggctgaagctggtttcctggccgaggcggagctgctgaacctgaggaagatcagctccgacttggacgggcacccggtcccgaaacaagctttcaccgacgtggccactggctccctgggccagggcctcggggccgcttgtgggatggcctacaccggcaaatacttcgacaaggccagctaccgagtctattgcttgctgggagacggggagctgtcagagggctctgtatgggaggccatggccttcgccagcatctataagctggacaaccttgtggccattctagacatcaatcgcctgggccagagtgacccggccccactgcagcaccagatggacatctaccagaagcggtgcgaggccttcggttggcatgccatcatcgtggatggacacagcgtggaggagctgtgcaaggcctttggccaggccaagcaccagccaacagccatcattgccaagaccttcaagggccgagggatcacgggggtagaagataaggagtcttggcatgggaagcccctccccaaaaacatggctgagcagatcatccaggagatctacagccagatccagagcaaaaagaagatcctggcaacccctccacaggaggacgcaccctcagtggacattgccaacatccgcatgcccagcctgcccagctacaaagttggggacaagatagccacccgcaaggcctacgggcaggcactggccaagctgggccatgccagtgaccgcatcatcgccctggatggggacaccaaaaattccaccttctcggagatcttcaaaaaggagcacccggaccgcttcatcgagtgctacattgctgagcagaacatggtgagcatcgcggtgggctgtgccacccgcaacaggacggtgcccttctgcagcacttttgcagccttcttcacgcgggcctttgaccagattcgcatggccgccatctccgagagcaacatcaacctctgcggctcccactgcggcgtttccatcggggaagacgggccctcccagatggccctagaagatctggctatgtttcggtcagtccccacatcaactgtcttttacccaagtgatggcgttgctacagagaaggcagtggaactagccgccaatacaaagggtatctgcttcatccggaccagccgcccagaaaatgccatcatctataacaacaatgaggacttccaggtcggacaagccaaggtggtcctgaagagcaaggatgaccaggtgaccgttatcggggctggggtgaccctgcacgaggccttggccgctgccgaactgctgaagaaagaaaagatcaacatccgcgtgctggaccccttcaccatcaagcccctggacagaaaactcattctcgacagcgctcgtgccaccaagggcaggatcctcaccgtggaggaccattattatgaaggtggcattggtgaggctgtgtccagtgcagtagtgggcgagcctggcatcactgtcacccacctggcagttaaccgggtaccaagaagtgggaagccggctgagctgctgaagatgtttggtatcgacagggatgccattgcacaagctgtgaggggcctcatcaccaaggcctaggcaggtgcggccgcactcgagcaccaccaccaccaccac

SEQ ID NO: 10 - protein, 628 aa, Homo sapiens
HHHHHHESYHKPDQQKLQALKDTANRLRISSIQATTAAGSGHPTSCCSAAEIMAVLFFHTMRYKSQDPRNPHNDRFVLSKGHAAPILYAVWAEAGFLAEAELLNLRKISSDLDGHPVPKQAFTDVATGSLGQGLGAACGMAYTGKYFDKASYRVYCLLGDGELSEGSVWEAMAFASIYKLDNLVAILDINRLGQSDPAPLQHQMDIYQKRCEAFGWHAIIVDGHSVEELCKAFGQAKHQPTAIIAKTFKGRGITGVEDKESWHGKPLPKNMAEQIIQEIYSQIQSKKKILATPPQEDAPSVDIANIRMPSLPSYKVGDKIATRKAYGQALAKLGHASDRIIALDGDTKNSTFSEIFKKEHPDRFIECYIAEQNMVSIAVGCATRNRTVPFCSTFAAFFTRAFDQIRMAAISESNINLCGSHCGVSIGEDGPSQMALEDLAMFRSVPTSTVFYPSDGVATEKAVELAANTKGICFIRTSRPENAIIYNNNEDFQVGQAKVVLKSKDDQVTVIGAGVTLHEALAAAELLKKEKINIRVLDPFTIKPLDRKLILDSARATKGRILTVEDHYYEGGIGEAVSSAVVGEPGITVTHLAVNRVPRSGKPAELLKMFGIDRDAIAQAVRGLITKA

SEQ ID NO: 11 - DNA, 1897 bp, Homo sapiens
  CDS (3)..(1883)
caccgaattccaccatggagagctaccacaagcctgaccagcagaagctgcaggccttgaaggacacggccaaccgcctacgtatcagctccatccaggccaccactgcggcgggctctggccaccccacgtcatgctgcagcgccgcagagatcatggctgtcctctttttccacaccatgcgctacaagtcccaggacccccggaatccgcacaatgaccgctttgtgctctccaagggccatgcagctcccatcctctacgcggtctgggctgaagctggtttcctggccgaggcggagctgctgaacctgaggaagatcagctccgacttggacgggcacccggtcccgaaacaagctttcaccgacgtggccactggctccctgggccagggcctcggggccgcttgtgggatggcctacaccggcaaatacttcgacaaggccagctaccgagtctattgcttgctgggagatggggagctgtcagagggctctgtatgggaggccatggccttcgccagcatctataagctggacaaccttgtggccattctagacatcaatcgcctgggccagagtgacccggccccgctgcagcaccagatggacatctaccagaagcggtgcgaggccttcggttggcatgccatcatcgtggatggacacagcgtggaggagctgtgcaaggcctttggccaggccaagcaccagccaacagccatcattgccaagaccttcaagggccgagggatcacgggggtagaagataaggagtcttggcatgggaagcccctccccaaaaacatggctgagcagatcatccaggagatctacagccagatccagagcaaaaagaagatcctggcaacccctccacaggaggacgcaccctcagtggacattgccaacatccgcatgcccagcctgcccagctacaaagttggggacaagatagccacccgcaaggcctacgggcaggcactggccaagctgggccatgccagtgaccgcatcatcgccctggatggggacaccaaaaattccaccttctcggagatcttcaaaaaggagcacccggaccgcttcatcgagtgctacattgccgagcagaacatggtgagcatcgcggtgggctgtgccacccgcaacaggacggtgcccttctgcagcacttttgcagccttcttcacgcgggcctttgaccagattcgcatggccgccatctccgagagcaacatcaacctctgcggctcccactgcggcgtttccatcggggaagacgggccctcccagatggccctagaagatctggctatgtttcggtcagtccccacatcaactgtcttttacccaagtgatggcgttgctacagagaaggcagtggaactagccgccaatacaaagggtatctgcttcatccggaccagccgcccagaaaatgccatcatctataacaacaatgaggacttccaggtcggacaagccaaggtggtcctgaagagcaaggatgaccaggtgaccgttatcggggctggggtgaccctgcacgaggccttggccgctgccgaactgctgaagaaagaaaagatcaacatccgcgtgctggaccccttcaccatcaagcccctggacagaaaactcattctcgacagcgctcgtgccaccaagggcaggatcctcaccgtggaggaccattattatgaaggtggcattggtgaggctgtgtccagtgcagtagtgggcgagcctggcatcactgtcacccacctggcagttaaccgggtaccaagaagtgggaagccagctgagctgctgaagatgtttggtatcgacagggatgccattgcacaagctgtgaggggcctcatcaccaaggcctaggcggccgctat

SEQ ID NO: 12 - protein, 627 aa, Homo sapiens
PNSTMESYHKPDQQKLQALKDTANRLRISSIQATTAAGSGHPTSCCSAAEIMAVLFFHTMRYKSQDPRNPHNDRFVLSKGHAAPILYAVWAEAGFLAEAELLNLRKISSDLDGHPVPKQAFTDVATGSLGQGLGAACGMAYTGKYFDKASYRVYCLLGDGELSEGSVWEAMAFASIYKLDNLVAILDINRLGQSDPAPLQHQMDIYQKRCEAFGWHAIIVDGHSVEELCKAFGQAKHQPTAIIAKTFKGRGITGVEDKESWHGKPLPKNMAEQIIQEIYSQIQSKKKILATPPQEDAPSVDIANIRMPSLPSYKVGDKIATRKAYGQALAKLGHASDRIIALDGDTKNSTFSEIFKKEHPDRFIECYIAEQNMVSIAVGCATRNRTVPFCSTFAAFFTRAFDQIRMAAISESNINLCGSHCGVSIGEDGPSQMALEDLAMFRSVPTSTVFYPSDGVATEKAVELAANTKGICFIRTSRPENAIIYNNNEDFQVGQAKVVLKSKDDQVTVIGAGVTLHEALAAAELLKKEKINIRVLDPFTIKPLDRKLILDSARATKGRILTVEDHYYEGGIGEAVSSAVVGEPGITVTHLAVNRVPRSGKPAELLKMFGIDRDAIAQAVRGLITKA

SEQ ID NO: 13 - DNA, 1897 bp, Homo sapiens; identical to SEQ ID NO: 11
  CDS (3)..(1883)

SEQ ID NO: 14 - protein, 627 aa, Homo sapiens; identical to SEQ ID NO: 12

SEQ ID NO: 15 - DNA, 1942 bp, Homo sapiens
  CDS (138)..(1883)
agagctaccacaagcctgaccagcagaagctgcaggccttgaaggacacggccaaccgcctacgtatcagctccatccaggccaccactgcggcgggctctggccaccccacgtcatgctgcagcgccgcagagatcatggctgtcctctttttccacaccatgcgctacaagtcccaggacccccggaatccgcacaatgaccgctttgtgctctccaagggccatgcagctcccatcctctacgcggtctgggctgaagctggtttcctggccgaggcggagctgctgaacctgaggaagatcagctccgacttggacgggcacccggtcccgaaacaagctttcaccgacgtggccactggctccctgggccagggcctcggggccgcttgtgggatggcctacaccggcaaatacttcgacaaggccagctaccgagtctattgcttgctgggagatggggagctgtcagagggctctgtatgggaggccatggccttcgccagcatctataagctggacaaccttgtggccattctagacatcaatcgcctgggccagagtgacccggccccgctgcagcaccagatggacatctaccagaagcggtgcgaggccttcggttggcatgccatcatcgtggatggacacagcgtggaggagctgtgcaaggcctttggccaggccaagcaccagccaacagccatcattgccaagaccttcaagggccgagggatcacgggggtagaagataaggagtcttggcatgggaagcccctccccaaaaacatggctgagcagatcatccaggagatctacagccagatccagagcaaaaagaagatcctggcaacccctccacaggaggacgcaccctcagtggacattgccaacatccgcatgcccagcctgcccagctacaaagttggggacaagatagccacccgcaaggcctacgggcaggcactggccaagctgggccatgccagtgaccgcatcatcgccctggatggggacaccaaaaattccaccttctcggagatcttcaaaaaggagcacccggaccgcttcatcgagtgctacattgccgagcagaacatggtgagcatcgcggtgggctgtgccacccgcaacaggacggtgcccttctgcagcacttttgcagccttcttcacgcgggcctttgaccagattcgcatggccgccatctccgagagcaacatcaacctctgcggctcccactgcggcgtttccatcggggaagacgggccctcccagatggccctagaagatctggctatgtttcggtcagtccccacatcaactgtcttttacccaagtgatggcgttgctacagagaaggcagtggaactagccgccaatacaaagggtatctgcttcatccggaccagccgcccagaaaatgccatcatctataacaacaatgaggacttccaggtcggacaagccaaggtggtcctgaagagcaaagatgaccaggtgaccgttatcggggctggggtgaccctgcacgaggccttggccgctgccgaactgctgaagaaagaaaagatcaacatccgcgtgctggaccccttcaccatcaagcccctggacagaaaactcattctcgacagcgctcgtgccaccaagggcaggatcctcaccgtggaggaccattattatgaaggtggcattggtgaggctgtgtccagtgcagtagtgggcgagcctggcatcactgtcacccacctggcagttaaccgggtaccaagaagtgggaagccagctgagctgctgaagatgtttggtatcgacagggatgccattgcacaagctgtgaggggcctcatcaccaaggcccatcatcaccaccatcactaggcaggtgcggccgctctcgagcaccaccaccaccaccactggagatcccggctgct

SEQ ID NO: 16 - protein, 582 aa, Homo sapiens
MAVLFFHTMRYKSQDPRNPHNDRFVLSKGHAAPILYAVWAEAGFLAEAELLNLRKISSDLDGHPVPKQAFTDVATGSLGQGLGAACGMAYTGKYFDKASYRVYCLLGDGELSEGSVWEAMAFASIYKLDNLVAILDINRLGQSDPAPLQHQMDIYQKRCEAFGWHAIIVDGHSVEELCKAFGQAKHQPTAIIAKTFKGRGITGVEDKESWHGKPLPKNMAEQIIQEIYSQIQSKKKILATPPQEDAPSVDIANIRMPSLPSYKVGDKIATRKAYGQALAKLGHASDRIIALDGDTKNSTFSEIFKKEHPDRFIECYIAEQNMVSIAVGCATRNRTVPFCSTFAAFFTRAFDQIRMAAISESNINLCGSHCGVSIGEDGPSQMALEDLAMFRSVPTSTVFYPSDGVATEKAVELAANTKGICFIRTSRPENAIIYNNNEDFQVGQAKVVLKSKDDQVTVIGAGVTLHEALAAAELLKKEKINIRVLDPFTIKPLDRKLILDSARATKGRILTVEDHYYEGGIGEAVSSAVVGEPGITVTHLAVNRVPRSGKPAELLKMFGIDRDAIAQAVRGLITKAHHHHHH

SEQ ID NO: 17 - DNA, 3047 bp, Homo sapiens
  CDS (281)..(1075)
actaagaccgcaaggcattcatttcctcctacggtggatgcggacgccgggaggaggagagccccagagagaggagctgggagcggaggcgcaggcaatgctcagccctggatgtagctgagaggctgggagaagagacgaccgctggagaccgagcggcgtggggaagacctaggggggtgggtgggggaagcagacaggagaacactcgaaatcaagcgctttacagattattttattttgtatagagaacacgtagcgactccgaagatcagccccaatgaacatgtcagtgttgactttacaagaatatgaattcgaaaagcagttcaacgagaatgaagccatccaatggatgcaggaaaactggaagaaatctttcctgttttctgctctgtatgctgcctttatattcggtggtcggcacctaatgaataaacgagcaaagtttgaactgaggaagccattagtgctctggtctctgacccttgcagtcttcagtatattcggtgctcttcgaactggtgcttatatggtgtacattttgatgaccaaaggcctgaagcagtcagtttgtgaccagggtttttacaatggacctgtcagcaaattctgggcttatgcatttgtgctaagcaaagcacccgaactaggagatacaatattcattattctgaggaagcagaagctgatcttcctgcactggtatcaccacatcactgtgctcctgtactcttggtactcctacaaagacatggttgccgggggaggttggttcatgactatgaactatggcgtgcacgccgtgatgtactcttactatgccttgcgggcggcaggtttccgagtctcccggaagtttgccatgttcatcaccttgtcccagatcactcagatgctgatgggctgtgtggttaactacctggtcttctgctggatgcagcatgaccagtgtcactctcactttcagaacatcttctggtcctcactcatgtacctcagctaccttgtgctcttctgccatttcttctttgaggcctacatcggcaaaatgaggaaaacaacgaaagctgaatagtgttggaactgaggaggaagccatagctcagggtcatcaagaaaaataatagacaaaagaaaatggcacaaggaatcacacgtggtgcagctaaaacaaaacaaaacatgagcaaacacaaaacccaaggcagcttagggataattaggttgatttaacccagtaagtttatgatccttttagggtgaggactcactgagtgcacctccatctccaagcactgctgctggaagaccccattccctctttatctatcaactctaggacaagggagaacaaaagcaagccagaagcagaggagactaatcaaaggcaaacaaaggctattaacacataggaaaatatgtatttactaagtgtcacatttctctaagatgaaagatttttactctagaaactgtgcgagcacaacacacacaatcctttctaactttatggacactaaactggagccaatagaaaagacaaaaatgaaagagacacagggtgtatatctagaacgataatgcttttgcagaaactaaagcctttttaagaaatgccagctgctgtagaccccatgagaaaagatgtcttaatcatccttatgaaaacagatgtaaacaactatatttcaactaacttcatcttcactgcatagcctcaggctagtgagtttgccaaaaccaaagggggtgaatacttccccaagattcttcctgggaggatggaaacagtgcagcccaggtcccatgggggcagctccatcccagagcatttctgatagttgaactgtaatttctactcttaagtgagatatgaagtattatccttttgttcagttgccccgggcttttgaacagaagagtaaatacagaattgaaaaagataaacactcaaccaaacaatgtgaaaacgggttctgtagtatttgtaaaaaggcccggcccaggaccactgtgagctggaaaagggagaaaggcagtgggaaaagaggtgagccgaagatcaattcgacagacagacggtgtgtatgcccctccctgtttgacttcacacacactcataactttccaaatgaaaccccacagtatagcgcatattttcgatatttttgtgaattccaaaaggaaatcacagggctgttcgaaatattgggggaacactgtgtttctgcatcatctgcatttgctccccaagcaatgtagaggtgtttaaagggccctctgctggctgagtggcaatactacaacaaacttcaaggcaagtttggctgaaaacagttgacaacaaagggcccccatacacttatccctcaaattttaagtgatatgaaatacttgtcatgtctttggccaaatcagaagatattcatcctgcttcaagtcagcttcagaaatgttttaaaagggactttagctctggaactcaaaatcaatttattaagagccatattctttaaaaaaaaaagctggataatattatctgtaatatttcagtcctttacaagccaaatacatgtgtcaatgtttctagtatttcaaagaagcaattatgtaaagttgttcaatgtgacataatagtattataattggttaagtagcttaatgattaggcaaactagatgaaaagattaggggcttccacactgcatagatcacacgcacatagccacgcatacacacacagacacacagatgtggggtacactgaatttcaaagcccaaatgaatagaaacacattttctggctagcagaaaaaaacaaaacaaaactgttgtttctctttcttgctttgagagtgtacagtaaaagggattttttcgaattatttttatattattttagctttaattgtgctgtcgttcatgaaacagagctgctctgcttttctgtcagagatggcaagggctttttcagcatctcgtttatgtgtggaatttaaaaagaataaagttttattccattctgaaaaaaaaaaaaaaaaagc

SEQ ID NO: 18 - protein, 265 aa, Homo sapiens
MNMSVLTLQEYEFEKQFNENEAIQWMQENWKKSFLFSALYAAFIFGGRHLMNKRAKFELRKPLVLWSLTLAVFSIFGALRTGAYMVYILMTKGLKQSVCDQGFYNGPVSKFWAYAFVLSKAPELGDTIFIILRKQKLIFLHWYHHITVLLYSWYSYKDMVAGGGWFMTMNYGVHAVMYSYYALRAAGFRVSRKFAMFITLSQITQMLMGCVVNYLVFCWMQHDQCHSHFQNIFWSSLMYLSYLVLFCHFFFEAYIGKMRKTTKAE

SEQ ID NO: 19 - DNA, 822 bp, Homo sapiens
  CDS (2)..(808)
caccggatccaccatgaacatgtcagtgttgactttacaagaatatgaattcgaaaagcagttcaacgagaatgaagccatccaatggatgcaggaaaactggaagaaatctttcctgttttctgctctgtatgctgcctttatattcggtggtcggcacctaatgaataaacgagcaaagtttgaactgaggaagccattagtgctctggtctctgacccttgcagtcttcagtatattcggtgctcttcgaactggtgcttatatggtgtacattttgatgaccaaaggcctgaagcagtcagtttgtgaccagggtttttacaatggacctgtcagcaaattctgggcttatgcatttgtgctaagcaaagcacccgaactaggagatacaatattcattattctgaggaagcagaagctgatcttcctgcactggtatcaccacatcactgtgctcctgtactcttggtactcctacaaagacatggttgccgggggaggttggttcatgactatgaactatggcgtgcacgccgtgatgtactcttactatgccttgcgggcggcaggtttccgagtctcccggaagtttgccatgttcatcaccttgtcccagatcactcagatgctgatgggctgtgtggttaactacctggtcttctgctggatgcagcatgaccagtgtcactctcactttcagaacatcttctggtcctcactcatgtacctcagctaccttgtgctcttctgccatttcttctttgaggcctacatcggcaaaatgaggaaaacaacgaaagctgaataggcggccgctat

SEQ ID NO: 20 - protein, 269 aa, Homo sapiens
TGSTMNMSVLTLQEYEFEKQFNENEAIQWMQENWKKSFLFSALYAAFIFGGRHLMNKRAKFELRKPLVLWSLTLAVFSIFGALRTGAYMVYILMTKGLKQSVCDQGFYNGPVSKFWAYAFVLSKAPELGDTIFIILRKQKLIFLHWYHHITVLLYSWYSYKDMVAGGGWFMTMNYGVHAVMYSYYALRAAGFRVSRKFAMFITLSQITQMLMGCVVNYLVFCWMQHDQCHSHFQNIFWSSLMYLSYLVLFCHFFFEAYIGKMRKTTKAE

SEQ ID NO: 21 - DNA, 834 bp, Homo sapiens
  CDS (1)..(792)
aacatgtcagtgttgactttacaagaatatgaattcgaaaagcagttcaacgagaatgaagccatccaatggatgcaggaaaactggaagaaatctttcctgttttctgctctgtatgctgcctttatattcggtggtcggcacctaatgaataaacgagcaaagtttgaactgaggaagccattagtgctctggtctctgacccttgcagtcttcagtatattcggtgctcttcgaactggtgcttatatggtgtacattttgatgaccaaaggcctgaagcagtcagtttgtgaccagggtttttacaatggacctgtcagcaaattctgggcttatgcatttgtgctaagcaaagcacccgaactaggagatacaatattcattattctgaggaagcagaagctgatcttcctgcactggtatcaccacatcactgtgctcctgtactcttggtactcctacaaagacatggttgccgggggaggttggttcatgactatgaactatggcgtgcacgccgtgatgtactcttactatgccttgcgggcggcaggtttccgagtctcccggaagtttgccatgttcatcaccttgtcccagatcactcagatgctgatgggctgtgtggttaactacctggtcttctgctggatgcagcatgaccagtgtcactctcactttcagaacatcttctggtcctcactcatgtacctcagctaccttgtgctcttctgccatttcttctttgaggcctacatcggcaaaatgaggaaaacaacgaaagctgaataggcaggtgcggccgcactcgagcaccaccaccaccaccac

SEQ ID NO: 22 - protein, 264 aa, Homo sapiens
NMSVLTLQEYEFEKQFNENEAIQWMQENWKKSFLFSALYAAFIFGGRHLMNKRAKFELRKPLVLWSLTLAVFSIFGALRTGAYMVYILMTKGLKQSVCDQGFYNGPVSKFWAYAFVLSKAPELGDTIFIILRKQKLIFLHWYHHITVLLYSWYSYKDMVAGGGWFMTMNYGVHAVMYSYYALRAAGFRVSRKFAMFITLSQITQMLMGCVVNYLVFCWMQHDQCHSHFQNIFWSSLMYLSYLVLFCHFFFEAYIGKMRKTTKAE

SEQ ID NO: 23 - DNA, 801 bp, Homo sapiens
  CDS (1)..(798)
accatgaacatgtcagtgttgactttacaagaatatgaattcgaaaagcagttcaacgagaatgaagccatccaatggatgcaggaaaactggaagaaatctttcctgttttctgctctgtatgctgcctttatattcggtggtcggcacctaatgaataaacgagcaaagtttgaactgaggaagccattagtgctctggtctctgacccttgcagtcttcagtatattcggtgctcttcgaactggtgcttatatggtgtacattttgatgaccaaaggcctgaagcagtcagtttgtgaccagggtttttacaatggacctgtcagcaaattctgggcttatgcatttgtgctaagcaaagcacccgaactaggagatacaatattcattattctgaggaagcagaagctgatcttcctgcactggtatcaccacatcactgtgctcctgtactcttggtactcctacaaagacatggttgccgggggaggttggttcatgactatgaactatggcgtgcacgccgtgatgtactcttactatgccttgcgggcggcaggtttccgagtctcccggaagtttgccatgttcatcaccttgtcccagatcactcagatgctgatgggctgtgtggttaactacctggtcttctgctggatgcagcatgaccagtgtcactctcactttcagaacatcttctggtcctcactcatgtacctcagctaccttgtgctcttctgccatttcttctttgaggcctacatcggcaaaatgaggaaaacaacgaaagctgaatag

SEQ ID NO: 24 - protein, 266 aa, Homo sapiens
TMNMSVLTLQEYEFEKQFNENEAIQWMQENWKKSFLFSALYAAFIFGGRHLMNKRAKFELRKPLVLWSLTLAVFSIFGALRTGAYMVYILMTKGLKQSVCDQGFYNGPVSKFWAYAFVLSKAPELGDTIFIILRKQKLIFLHWYHHITVLLYSWYSYKDMVAGGGWFMTMNYGVHAVMYSYYALRAAGFRVSRKFAMFITLSQITQMLMGCVVNYLVFCWMQHDQCHSHFQNIFWSSLMYLSYLVLFCHFFFEAYIGKMRKTTKAE

SEQ ID NO: 25 - DNA, 834 bp, Homo sapiens; identical to SEQ ID NO: 21
  CDS (1)..(792)

SEQ ID NO: 26 - protein, 264 aa, Homo sapiens; identical to SEQ ID NO: 22

SEQ ID NO: 27 - DNA, 834 bp, Homo sapiens
  CDS (1)..(831)
tccaccatgggttacccatatgacgttccagactacgcaaacatgtcagtgttgactttacaagaatatgaattcgaaaagcagttcaacgagaatgaagccatccaatggatgcaggaaaactggaagaaatctttcctgttttctgctctgtatgctgcctttatattcggtggtcggcacctaatgaataaacgagcaaagtttgaactgaggaagccattagtgctctggtctctgacccttgcagtcttcagtatattcggtgctcttcgaactggtgcttatatggtgtacattttgatgaccaaaggcctgaagcagtcagtttgtgaccagggtttttacaatggacctgtcagcaaattctgggcttatgcatttgtgctaagcaaagcacccgaactaggagatacaatattcattattctgaggaagcagaagctgatcttcctgcactggtatcaccacatcactgtgctcctgtactcttggtactcctacaaagacatggttgccgggggaggttggttcatgactatgaactatggcgtgcacgccgtgatgtactcttactatgccttgcgggcggcaggtttccgagtctcccggaagtttgccatgttcatcaccttgtcccagatcactcagatgctgatgggctgtgtggttaactacctggtcttctgctggatgcagcatgaccagtgtcactctcactttcagaacatcttctggtcctcactcatgtacctcagctaccttgtgctcttctgccatttcttctttgaggcctacatcggcaaaatgaggaaaacaacgaaagctgaatag

SEQ ID NO: 28 - protein, 277 aa, Homo sapiens
STMGYPYDVPDYANMSVLTLQEYEFEKQFNENEAIQWMQENWKKSFLFSALYAAFIFGGRHLMNKRAKFELRKPLVLWSLTLAVFSIFGALRTGAYMVYILMTKGLKQSVCDQGFYNGPVSKFWAYAFVLSKAPELGDTIFIILRKQKLIFLHWYHHITVLLYSWYSYKDMVAGGGWFMTMNYGVHAVMYSYYALRAAGFRVSRKFAMFITLSQITQMLMGCVVNYLVFCWMQHDQCHSHFQNIFWSSLMYLSYLVLFCHFFFEAYIGKMRKTTKAE

SEQ ID NO: 29 - DNA, 1584 bp, Homo sapiens
  CDS (49)..(1239)
gcgtcccccacaccacagacccgcgccgccgacgacccagcagccgccatgcgtctgctccgaggtgtgtttgtagttgctgctaagcgaacgccctttggagcttacggaggccttctgaaagacttcactgctactgacttgtctgaatttgctgccaaggctgccttgtctgctggcaaagtctcacctgaaacagttgacagtgtgattatgggcaatgtcctgcagagttcttcagatgctatatatttggcaaggcatgttggtttgcgtgtgggaatcccaaaggagaccccagctctcacgattaataggctctgtggttctggttttcagtccattgtgaatggatgtcaggaaatttgtgttaaagaagctgaagttgttttatgtggaggaaccgaaagcatgagccaagctccctactgtgtcagaaatgtgcgttttggaaccaagcttggatcagatatcaagctggaagattctttatgggtatcattaacagatcagcatgtccagctccccatggcaatgactgcagagaatcttactgtaaaacacaaaataagcagagaagaatgtgacaaatatgccctgcagtcacagcagagatggaaagctgctaatgatgctggctactttaatgatgaaatggcaccaattgaagtgaagacaaagaaaggaaaacagacaatgcaggtagacgagcatgctcggccccaaaccaccctggaacagttacagaaacttcctccagtattcaagaaagatggaactgttactgcagggaatgcatcgggtgtagctgatggtgctggagctgttatcatagctagtgaagatgctgttaagaaacataacttcacaccactggcaagaattgtgggctactttgtatctggatgtgatccctctatcatgggtattggtcctgtccctgctatcagtggggcactgaagaaagcaggactgagtcttaaggacatggatttggtagaggtgaatgaagcttttgctccccagtacttggctgttgagaggagtttggatcttgacataagtaaaaccaatgtgaatggaggagccattgctttgggtcacccactgggaggatctggatcaagaattactgcacacctggttcacgaattaaggcgtcgaggtggaaaatatgccgttggatcagcttgcattggaggtggccaaggtattgctgtcatcattcagagcacagcctgaagagaccagtgagctcactgtgacccatccttactctacttggccaggccacagtaaaacaagtgaccttcagagcagctgccacaactggccatgccctgccattgaaacagtgattaagtttgatcaagccatggtgacacaaaaatgcattgatcatgaataggagcccatgctagaagtacattctctcagatttgaaccagtgaaatatgatgtatttctgagctaaaactcaactatagaagacattaaaagaaatcgtattcttgccaagtaaccaccacttctgccttagataatatgattataaggaaatcaaataaatgttgccttaacttc

SEQ ID NO: 30 - protein, 397 aa, Homo sapiens
MRLLRGVFVVAAKRTPFGAYGGLLKDFTATDLSEFAAKAALSAGKVSPETVDSVIMGNVLQSSSDAIYLARHVGLRVGIPKETPALTINRLCGSGFQSIVNGCQEICVKEAEVVLCGGTESMSQAPYCVRNVRFGTKLGSDIKLEDSLWVSLTDQHVQLPMAMTAENLTVKHKISREECDKYALQSQQRWKAANDAGYFNDEMAPIEVKTKKGKQTMQVDEHARPQTTLEQLQKLPPVFKKDGTVTAGNASGVADGAGAVIIASEDAVKKHNFTPLARIVGYFVSGCDPSIMGIGPVPAISGALKKAGLSLKDMDLVEVNEAFAPQYLAVERSLDLDISKTNVNGGAIALGHPLGGSGSRITAHLVHELRRRGGKYAVGSACIGGGQGIAVIIQSTA

SEQ ID NO: 31 - DNA, 1218 bp, Homo sapiens
  CDS (2)..(1204)
caccggatccaccatgcgtctgctccgaggtgtgtttgtagttgctgctaagcgaacgccctttggagcttacggaggccttctgaaagacttcactgctactgacttgtctgaatttgctgccaaggctgccttgtctgctggcaaagtctcacctgaaacagttgacagtgtgattatgggcaatgtcctgcagagttcttcagatgctatatatttggcaaggcatgttggtttgcgtgtgggaatcccaaaggagaccccagctctcacgattaataggctctgtggttctggttttcagtccattgtgaatggatgtcaggaaatttgtgttaaagaagctgaagttgttttatgtggaggaaccgaaagcatgagccaagctccctactgtgtcagaaatgtgcgttttggaaccaagcttggatcagatatcaagctggaagattctttatgggtatcattaacagatcagcatgtccagctccccatggcaatgactgcagagaatcttgctgtaaaacacaaaataagcagagaagaatgtgacaaatatgccctgcagtcacagcagagatggaaagctgctaatgatgctggctactttaatgatgaaatggcaccaattgaagtgaagacaaagaaaggaaaacagacaatgcaggtagacgagcatgctcggccccaaaccaccctggaacagttacagaaacttcctccagtattcaagaaagatggaactgttactgcagggaatgcatcgggtgtagctgatggtgctggagctgttatcatagctagtgaagatgctgttaagaaacataacttcacaccactggcaagaattgtgggctactttgtatctggatgtgatccctctatcatgggtattggtcctgtccctgctatcagtggggcactgaagaaagcaggactgagtcttaaggacatggatttggtagaggtgaatgaagcttttgctccccagtacttggctgttgagaggagtttggatcttgacataagtaaaaccaatgtgaatggaggagccattgctttgggtcacccactgggaggatctggatcaagaattactgcacacctggttcacgaattaaggcgtcgaggtggaaaatatgccgttggatcagcttgcattggaggtggccaaggtattgctgtcatcattcagagcacagcctgagcggccgctat

SEQ ID NO: 32 - protein, 401 aa, Homo sapiens
TGSTMRLLRGVFVVAAKRTPFGAYGGLLKDFTATDLSEFAAKAALSAGKVSPETVDSVIMGNVLQSSSDAIYLARHVGLRVGIPKETPALTINRLCGSGFQSIVNGCQEICVKEAEVVLCGGTESMSQAPYCVRNVRFGTKLGSDIKLEDSLWVSLTDQHVQLPMAMTAENLAVKHKISREECDKYALQSQQRWKAANDAGYFNDEMAPIEVKTKKGKQTMQVDEHARPQTTLEQLQKLPPVFKKDGTVTAGNASGVADGAGAVIIASEDAVKKHNFTPLARIVGYFVSGCDPSIMGIGPVPAISGALKKAGLSLKDMDLVEVNEAFAPQYLAVERSLDLDISKTNVNGGAIALGHPLGGSGSRITAHLVHELRRRGGKYAVGSACIGGGQGIAVIIQSTA

SEQ ID NO: 33 - DNA, 1218 bp, Homo sapiens; identical to SEQ ID NO: 31
  CDS (2)..(1204)

SEQ ID NO: 34 - protein, 401 aa, Homo sapiens; identical to SEQ ID NO: 32

SEQ ID NO: 35 - DNA, 1248 bp, Homo sapiens
  CDS (3)..(1223)
acgcgtctcccatgggacatcatcaccaccatcaccgtctgctccgaggtgtgtttgtagttgctgctaagcgaacgccctttggagcttacggaggccttctgaaagacttcactgctactgacttgtctgaatttgctgccaaggctgccttgtctgctggcaaagtctcacctgaaacagttgacagtgtgattatgggcaatgtcctgcagagttcttcagatgctatatatttggcaaggcatgttggtttgcgtgtgggaatcccaaaggagaccccagctctcacgattaataggctctgtggttctggttttcagtccattgtgaatggatgtcaggaaatttgtgttaaagaagctgaagttgttttatgtggaggaaccgaaagcatgagccaagctccctactgtgtcagaaatgtgcgttttggaaccaagcttggatcagatatcaagctggaagattctttatgggtatcattaacagatcagcatgtccagctccccatggcaatgactgcagagaatcttgctgtaaaacacaaaataagcagagaagaatgtgacaaatatgccctgcagtcacagcagagatggaaagctgctaatgatgctggctactttaatgatgaaatggcaccaattgaagtgaagacaaagaaaggaaaacagacaatgcaggtagacgagcatgctcggccccaaaccaccctggaacagttacagaaacttcctccagtattcaagaaagatggaactgttactgcagggaatgcatcgggtgtagctgatggtgctggagctgttatcatagctagtgaagatgctgttaagaaacataacttcacaccactggcaagaattgtgggctactttgtatctggatgtgatccctctatcatgggtattggtcctgtccctgctatcagtggggcactgaagaaagcaggactgagtcttaaggacatggatttggtagaggtgaatgaagcttttgctccccagtacttggctgttgagaggagtttggatcttgacataagtaaaaccaatgtgaatggaggagccattgctttgggtcacccactgggaggatctggatcaagaattactgcacacctggttcacgaattaaggcgtcgaggtggaaaatatgccgttggatcagcttgcattggaggtggccaaggtattgctgtcatcattcagagcacagcctgagcaggtgcggccggagacgaag

SEQ ID NO: 36 - protein, 407 aa, Homo sapiens
ASPMGHHHHHHRLLRGVFVVAAKRTPFGAYGGLLKDFTATDLSEFAAKAALSAGKVSPETVDSVIMGNVLQSSSDAIYLARHVGLRVGIPKETPALTINRLCGSGFQSIVNGCQEICVKEAEVVLCGGTESMSQAPYCVRNVRFGTKLGSDIKLEDSLWVSLTDQHVQLPMAMTAENLAVKHKISREECDKYALQSQQRWKAANDAGYFNDEMAPIEVKTKKGKQTMQVDEHARPQTTLEQLQKLPPVFKKDGTVTAGNASGVADGAGAVIIASEDAVKKHNFTPLARIVGYFVSGCDPSIMGIGPVPAISGALKKAGLSLKDMDLVEVNEAFAPQYLAVERSLDLDISKTNVNGGAIALGHPLGGSGSRITAHLVHELRRRGGKYAVGSACIGGGQGIAVIIQSTA

SEQ ID NO: 37 - DNA, 1249 bp, Homo sapiens
  CDS (2)..(1207)
acatcatcaccaccatcaccgtctgctccgaggtgtgtttgtagttgctgctaagcgaacgccctttggagcttacggaggccttctgaaagacttcactgctactgacttgtctgaatttgctgccaaggctgccttgtctgctggcaaagtctcacctgaaacagttgacagtgtgattatgggcaatgtcctgcagagttcttcagatgctatatatttggcaaggcatgttggtttgcgtgtgggaatcccaaaggagaccccagctctcacgattaataggctctgtggttctggttttcagtccattgtgaatggatgtcaggaaatttgtgttaaagaagctgaagttgttttatgtggaggaaccgaaagcatgagccaagctccctactgtgtcagaaatgtgcgttttggaaccaagcttggatcagatatcaagctggaagattctttatgggtatcattaacagatcagcatgtccagctccccatggcaatgactgcagagaatcttgctgtaaaacacaaaataagcagagaagaatgtgacaaatatgccctgcagtcacagcagagatggaaagctgctaatgatgctggctactttaatgatgaaatggcaccaattgaagtgaagacaaagaaaggaaaacagacaatgcaggtagacgagcatgctcggccccaaaccaccctggaacagttacagaaacttcctccagtattcaagaaagatggaactgttactgcagggaatgcatcgggtgtagctgatggtgctggagctgttatcatagctagtgaagatgctgttaagaaacataacttcacaccactggcaagaattgtgggctactttgtatctggatgtgatccctctatcatgggtattggtcctgtccctgctatcagtggggcactgaagaaagcaggactgagtcttaaggacatggatttggtagaggtgaatgaagcttttgctccccagtacttggctgttgagaggagtttggatcttgacataagtaaaaccaatgtgaatggaggagccattgctttgggtcacccactgggaggatctggatcaagaattactgcacacctggttcacgaattaaggcgtcgaggtggaaaatatgccgttggatcagcttgcattggaggtggccaaggtattgctgtcatcattcagagcacagcctgagcaggtgcggccgcactcgagcaccaccaccaccaccac

SEQ ID NO: 38 - protein, 402 aa, Homo sapiens
HHHHHHRLLRGVFVVAAKRTPFGAYGGLLKDFTATDLSEFAAKAALSAGKVSPETVDSVIMGNVLQSSSDAIYLARHVGLRVGIPKETPALTINRLCGSGFQSIVNGCQEICVKEAEVVLCGGTESMSQAPYCVRNVRFGTKLGSDIKLEDSLWVSLTDQHVQLPMAMTAENLAVKHKISREECDKYALQSQQRWKAANDAGYFNDEMAPIEVKTKKGKQTMQVDEHARPQTTLEQLQKLPPVFKKDGTVTAGNASGVADGAGAVIIASEDAVKKHNFTPLARIVGYFVSGCDPSIMGIGPVPAISGALKKAGLSLKDMDLVEVNEAFAPQYLAVERSLDLDISKTNVNGGAIALGHPLGGSGSRITAHLVHELRRRGGKYAVGSACIGGGQGIAVIIQSTA

SEQ ID NO: 39 - DNA, 1248 bp, Homo sapiens
  CDS (1)..(1206)
cgtctgctccgaggtgtgtttgtagttgctgctaagcgaacgccctttggagcttacggaggccttctgaaagacttcactgctactgacttgtctgaatttgctgccaaggctgccttgtctgctggcaaagtctcacctgaaacagttgacagtgtgattatgggcaatgtcctgcagagttcttcagatgctatatatttggcaaggcatgttggtttgcgtgtgggaatcccaaaggagaccccagctctcacgattaataggctctgtggttctggttttcagtccattgtgaatggatgtcaggaaatttgtgttaaagaagctgaagttgttttatgtggaggaaccgaaagcatgagccaagctccctactgtgtcagaaatgtgcgttttggaaccaagcttggatcagatatcaagctggaagattctttatgggtatcattaacagatcagcatgtccagctccccatggcaatgactgcagagaatcttgctgtaaaacacaaaataagcagagaagaatgtgacaaatatgccctgcagtcacagcagagatggaaagctgctaatgatgctggctactttaatgatgaaatggcaccaattgaagtgaagacaaagaaaggaaaacagacaatgcaggtagacgagcatgctcggccccaaaccaccctggaacagttacagaaacttcctccagtattcaagaaagatggaactgttactgcagggaatgcatcgggtgtagctgatggtgctggagctgttatcatagctagtgaagatgctgttaagaaacataacttcacaccactggcaagaattgtgggctactttgtatctggatgtgatccctctatcatgggtattggtcctgtccctgctatcagtggggcactgaagaaagcaggactgagtcttaaggacatggatttggtagaggtgaatgaagcttttgctccccagtacttggctgttgagaggagtttggatcttgacataagtaaaaccaatgtgaatggaggagccattgctttgggtcacccactgggaggatctggatcaagaattactgcacacctggttcacgaattaaggcgtcgaggtggaaaatatgccgttggatcagcttgcattggaggtggccaaggtattgctgtcatcattcagagcacagcccatcatcaccaccatcactgagcaggtgcggccgcactcgagcaccaccaccaccaccac

SEQ ID NO: 40 - protein, 402 aa, Homo sapiens
RLLRGVFVVAAKRTPFGAYGGLLKDFTATDLSEFAAKAALSAGKVSPETVDSVIMGNVLQSSSDAIYLARHVGLRVGIPKETPALTINRLCGSGFQSIVNGCQEICVKEAEVVLCGGTESMSQAPYCVRNVRFGTKLGSDIKLEDSLWVSLTDQHVQLPMAMTAENLAVKHKISREECDKYALQSQQRWKAANDAGYFNDEMAPIEVKTKKGKQTMQVDEHARPQTTLEQLQKLPPVFKKDGTVTAGNASGVADGAGAVIIASEDAVKKHNFTPLARIVGYFVSGCDPSIMGIGPVPAISGALKKAGLSLKDMDLVEVNEAFAPQYLAVERSLDLDISKTNVNGGAIALGHPLGGSGSRITAHLVHELRRRGGKYAVGSACIGGGQGIAVIIQSTAHHHHHH

SEQ ID NO: 41 - DNA, 1230 bp, Homo sapiens
  CDS (1)..(1188)
cgtctgctccgaggtgtgtttgtagttgctgctaagcgaacgccctttggagcttacggaggccttctgaaagacttcactgctactgacttgtctgaatttgctgccaaggctgccttgtctgctggcaaagtctcacctgaaacagttgacagtgtgattatgggcaatgtcctgcagagttcttcagatgctatatatttggcaaggcatgttggtttgcgtgtgggaatcccaaaggagaccccagctctcacgattaataggctctgtggttctggttttcagtccattgtgaatggatgtcaggaaatttgtgttaaagaagctgaagttgttttatgtggaggaaccgaaagcatgagccaagctccctactgtgtcagaaatgtgcgttttggaaccaagcttggatcagatatcaagctggaagattctttatgggtatcattaacagatcagcatgtccagctccccatggcaatgactgcagagaatcttgctgtaaaacacaaaataagcagagaagaatgtgacaaatatgccctgcagtcacagcagagatggaaagctgctaatgatgctggctactttaatgatgaaatggcaccaattgaagtgaagacaaagaaaggaaaacagacaatgcaggtagacgagcatgctcggccccaaaccaccctggaacagttacagaaacttcctccagtattcaagaaagatggaactgttactgcagggaatgcatcgggtgtagctgatggtgctggagctgttatcatagctagtgaagatgctgttaagaaacataacttcacaccactggcaagaattgtgggctactttgtatctggatgtgatccctctatcatgggtattggtcctgtccctgctatcagtggggcactgaagaaagcaggactgagtcttaaggacatggatttggtagaggtgaatgaagcttttgctccccagtacttggctgttgagaggagtttggatcttgacataagtaaaaccaatgtgaatggaggagccattgctttgggtcacccactgggaggatctggatcaagaattactgcacacctggttcacgaattaaggcgtcgaggtggaaaatatgccgttggatcagcttgcattggaggtggccaaggtattgctgtcatcattcagagcacagcctgagcaggtgcggccgcactcgagcaccaccaccaccaccac

SEQ ID NO: 42 - protein, 396 aa, Homo sapiens
RLLRGVFVVAAKRTPFGAYGGLLKDFTATDLSEFAAKAALSAGKVSPETVDSVIMGNVLQSSSDAIYLARHVGLRVGIPKETPALTINRLCGSGFQSIVNGCQEICVKEAEVVLCGGTESMSQAPYCVRNVRFGTKLGSDIKLEDSLWVSLTDQHVQLPMAMTAENLAVKHKISREECDKYALQSQQRWKAANDAGYFNDEMAPIEVKTKKGKQTMQVDEHARPQTTLEQLQKLPPVFKKDGTVTAGNASGVADGAGAVIIASEDAVKKHNFTPLARIVGYFVSGCDPSIMGIGPVPAISGALKKAGLSLKDMDLVEVNEAFAPQYLAVERSLDLDISKTNVNGGAIALGHPLGGSGSRITAHLVHELRRRGGKYAVGSACIGGGQGIAVIIQSTA

SEQ ID NO: 43 - DNA, 1221 bp, Homo sapiens
  CDS (4)..(1194)
accatgcgtctgctccgaggtgtgtttgtagttgctgctaagcgaacgccctttggagcttacggaggccttctgaaagacttcactgctactgacttgtctgaatttgctgccaaggctgccttgtctgctggcaaagtctcacctgaaacagttgacagtgtgattatgggcaatgtcctgcagagttcttcagatgctatatatttggcaaggcatgttggtttgcgtgtgggaatcccaaaggagaccccagctctcacgattaataggctctgtggttctggttttcagtccattgtgaatggatgtcaggaaatttgtgttaaagaagctgaagttgttttatgtggaggaaccgaaagcatgagccaagctccctactgtgtcagaaatgtgcgttttggaaccaagcttggatcagatatcaagctggaagattctttatgggtatcattaacagatcagcatgtccagctccccatggcaatgactgcagagaatcttgctgtaaaacacaaaataagcagagaagaatgtgacaaatatgccctgcagtcacagcagagatggaaagctgctaatgatgctggctactttaatgatgaaatggcaccaattgaagtgaagacaaagaaaggaaaacagacaatgcaggtagacgagcatgctcggccccaaaccaccctggaacagttacagaaacttcctccagtattcaagaaagatggaactgttactgcagggaatgcatcgggtgtagctgatggtgctggagctgttatcatagctagtgaagatgctgttaagaaacataacttcacaccactggcaagaattgtgggctactttgtatctggatgtgatccctctatcatgggtattggtcctgtccctgctatcagtggggcactgaagaaagcaggactgagtcttaaggacatggatttggtagaggtgaatgaagcttttgctccccagtacttggctgttgagaggagtttggatcttgacataagtaaaaccaatgtgaatggaggagccattgctttgggtcacccactgggaggatctggatcaagaattactgcacacctggttcacgaattaaggcgtcgaggtggaaaatatgccgttggatcagcttgcattggaggtggccaaggtattgctgtcatcattcagagcacagcccatcatcaccaccatcactgagcaggt

SEQ ID NO: 44 - protein, 397 aa, Homo sapiens [sequence omitted]

SEQ ID NO: 45 - DNA, 834 bp, Homo sapiens
  CDS (36)..(794)
cccgtccagagtcctctgtggtccctgctgccaccatggccactcaccgcctcgtgatggtccggcacggcgagacgacatggaaccaggagaaccgtttctgtggctggttcgatgcagagctgagtgaaaaggggaccgaggaggccaagcggggagccaaggccatcaaggatgccaagatggagtttgacatctgctacacgtcagtgctgaagcgggccatccgaaccctctgggccatcctggacggcacggaccagatgtggctgcctgtggtgcgcacttggcgcttcaatgagcggcattacgggggcctcacaggcttcaacaaggcagaaacggccgccaagcacggggaggagcaggtaagatcttggaggcgctccttcgacatcccgccgcccccgatggacgagaagcacccctactacaactccattagcaaggagcgtcggtacgcaggcctgaagcccggggaactccccacctgcgagagcctcaaggacaccattgcccgggccctgcccttctggaacgaggagattgttccccagatcaaggccggcaagcgagtgctcattgcagcccacgggaacagcctgcggggcattgtcaagcacctggaagggatgtcagaccaggcgatcatggagctgaacctgcccacggggatccccattgtgtatgagctgaacaaggagctgaagcccaccaagcccatgcagttcctgggtgatgaggaaacggtgcggaaggccatggaggctgtggctgcccagggcaaggccaagtgaggggtgggctttgggcaataaaggcacctcccccaac

SEQ ID NO: 46 - protein, 253 aa, Homo sapiens
MATHRLVMVRHGETTWNQENRFCGWFDAELSEKGTEEAKRGAKAIKDAKMEFDICYTSVLKRAIRTLWAILDGTDQMWLPVVRTWRFNERHYGGLTGFNKAETAAKHGEEQVRSWRRSFDIPPPPMDEKHPYYNSISKERRYAGLKPGELPTCESLKDTIARALPFWNEEIVPQIKAGKRVLIAAHGNSLRGIVKHLEGMSDQAIMELNLPTGIPIVYELNKELKPTKPMQFLGDEETVRKAMEAVAAQGKAK

SEQ ID NO: 47 - DNA, 786 bp, Homo sapiens
  CDS (1)..(783)
accatgggacatcatcaccaccatcacgccactcaccgcctcgtgatggtccggcacggcgagagcacatggaaccaggagaaccgtttctgtggctggttcgatgcagagctgagtgaaaaggggaccgaggaggccaagcggggagccaaggccatcaaggatgccaagatggagtttgacatctgctacacgtcagtgctgaagcgggccatccgcaccctctgggccatcctggacggcacggaccagatgtggctgcctgtggtgcgcacttggcgcctcaatgagcggcattacgggggcctcacaggcctcaacaaggcagaaacggccgccaagcacggggaggagcaggtgaagatctggaggcgctccttcgacatcccgccgcccccgatggacgagaagcacccctactacaactccattagcaaggagcgtcggtacgcaggcctgaagcccggggaactccccacctgcgagagcctcaaggacaccattgcccgggccctgcccttctggaacgaggagattgttccccagatcaaggccggcaagcgagtgctcattgcagcccacgggaacagcctgcggggcattgtcaagcacctggaagggatgtcagaccaggcgatcatggagctgaacctgcccacggggatccccattgtgtatgagctgaacaaggagctgaagcccaccaagcccatgcagttcctgggtgatgaggaaacggtgcggaaggccatggaggctgtggctgcccagggcaaggccaagtga

SEQ ID NO: 48 - protein, 261 aa, Homo sapiens
TMGHHHHHHATHRLVMVRHGESTWNQENRFCGWFDAELSEKGTEEAKRGAKAIKDAKMEFDICYTSVLKRAIRTLWAILDGTDQMWLPVVRTWRLNERHYGGLTGLNKAETAAKHGEEQVKIWRRSFDIPPPPMDEKHPYYNSISKERRYAGLKPGELPTCESLKDTIARALPFWNEEIVPQIKAGKRVLIAAHGNSLRGIVKHLEGMSDQAIMELNLPTGIPIVYELNKELKPTKPMQFLGDEETVRKAMEAVAAQGKAK

SEQ ID NO: 49 - DNA, 898 bp, Homo sapiens
  CDS (67)..(825)
aattcggtacgagggttgggaagcagccgtccccgtccagagtcctctgtggtccctgctgccaccatggccactcaccgcctcgtgatggtccggcacggcgagagcacatggaaccaggagaaccgtttctgtggctggttcgatgcagagctgagtgaaaaggggaccgaggaggccaagcggggagccaaggccatcaaggatgccaagatggagtttgacatctgctacacgtcagtgctgaagcgggccatccgcaccctctgggccatcctggacggcacggaccagatgtggctgcctgtggtgcgcacttggcgcctcaatgagcggcattacgggggcctcacaggcctcaacaaggcagaaacggccgccaagcacggggaggagcaggtgaagatctggaggcgctccttcgacatcccgccgcccccgatggacgagaagcacccctactacaactccattagcaaggagcgtcggtacgcaggcctgaagcccggggaactccccacctgcgagagcctcaaggacaccattgcccgggccctgcccttctggaacgaggagattgttccccagatcaaggccggcaagcgagtgctcattgcagcccacgggaacagcctgcggggcattgtcaagcacctggaagggatgtcagaccaggcgatcatggagctgaacctgcccacggggatccccattgtgtatgagctgaacaaggagctgaagcccaccaagcccatgcagttcctgggtgatgaggaaacggtgcggaaggccatggaggctgtggctgcccagggcaaggccaagtgaggggtgggcttgggcaataaaggcacctcccccaacaaaaaaaaaaaaaaaaaaaaaaaaaaaaaaaagc

SEQ ID NO: 50 - protein, 253 aa, Homo sapiens
MATHRLVMVRHGESTWNQENRFCGWFDAELSEKGTEEAKRGAKAIKDAKMEFDICYTSVLKRAIRTLWAILDGTDQMWLPVVRTWRLNERHYGGLTGLNKAETAAKHGEEQVKIWRRSFDIPPPPMDEKHPYYNSISKERRYAGLKPGELPTCESLKDTIARALPFWNEEIVPQIKAGKRVLIAAHGNSLRGIVKHLEGMSDQAIMELNLPTGIPIVYELNKELKPTKPMQFLGDEETVRKAMEAVAAQGKAK

SEQ ID NO: 51 - DNA, 763 bp, Homo sapiens
  CDS (1)..(759)
accatggccactcaccgcctcgtgatggtccggcacggcgagagcacatggaaccaggagaaccgtttctgtggctggttcgatgcagagctgagtgaaaaggggaccgaggaggccaagcggggagccaaggccatcaaggatgccaagatggagtttgacatctgctacacgtcagtgctgaagcgggccatccgcaccctctgggccatcctggacggcacggaccagatgtggctgcctgtggtgcgcacttggcgcctcaatgagcggcattacgggggcctcacaggcctcaacaaggcagaaacggccgccaagcacggggaggagcaggtgaagatctggaggcgctccttcgacatcccgccgcccccgatggacgagaagcacccctactacaactccattagcaaggagcgtcggtacgcaggcctgaagcccggggaactccccacctgcgagagcctcaaggacaccattgcccgggccctgcccttctggaacgaggagattgttccccagatcaaggccggcaagcgagtgctcattgcagcccacgggaacagcctgcggggcattgtcaagcacctggaagggatgtcagaccaggcgatcatggagctgaacctgcccacggggatccccattgtgtatgagctgaacaaggagctgaagcccaccaagcccatgcagttcctgggtgatgaggaaacggtgcggaaggccatggaggctgtggctgcccagggcaaggccaagt

SEQ ID NO: 52 - protein, 253 aa, Homo sapiens
TMATHRLVMVRHGESTWNQENRFCGWFDAELSEKGTEEAKRGAKAIKDAKMEFDICYTSVLKRAIRTLWAILDGTDQMWLPVVRTWRLNERHYGGLTGLNKAETAAKHGEEQVKIWRRSFDIPPPPMDEKHPYYNSISKERRYAGLKPGELPTCESLKDTIARALPFWNEEIVPQIKAGKRVLIAAHGNSLRGIVKHLEGMSDQAIMELNLPTGIPIVYELNKELKPTKPMQFLGDEETVRKAMEAVAAQGKA

SEQ ID NO: 53 - DNA, 786 bp, Homo sapiens; identical to SEQ ID NO: 47
  CDS (1)..(783)

SEQ ID NO: 54 - protein, 261 aa, Homo sapiens; identical to SEQ ID NO: 48

SEQ ID NO: 55 - DNA, 1003 bp, Homo sapiens
  CDS (5)..(982)
cgccatgccgccctccatctcagctttccaggccgcctacatcggcatcgaggtgctcatcgccctggtctctgtgcccgggaacgtgctggtgatctgggcggtgaaggtgaaccaggcgctgcgggatgccaccttctgcttcatcgtgtcgctggcggtggctgatgtggccgtgggtgccctggtcatccccctcgccatcctcatcaacattgggccacagacctacttccacacctgcctcatggttgcctgtccggtcctcatcctcacccagagctccatcctggccctgctggcaattgcggtggaccgctacctccgggtcaagatccctctccggtacaagatggtggtgaccccccggagggcggcggtggccatagccggctgctggatcctctccttcgtggtgggactgacccctatgtttggctggaacaatctgagtgcggtggagcgggcctgggcagccaacggcagcatgggggagcccgtgatcaagtgcgagttcgagaaggtcatcagcatggagtacatggtctacttcaacttctttgtgtgggtgctgcccccgcttctcctcatggtcctcatctacctggaggtcttctacctaatccgcaagcagctcaacaagaaggtgtcggcctcctccggcgacccgcagaagtactatgggaaggagctgaagatcgccaagtcgctggccctcatcctcttcctctttgccctcagctggctgcctttgcacatcctcaactgcatcaccctcttctgcccgtcctgccacaagcccagcatccttacctacattgccatcttcctcacgcacggcaactcggccatgaaccccattgtctatgccttccgcatccagaagttccgcgtcaccttccttaagatttggaatgaccatttccgctgccagcctgcacctcccattgacgaggatctcccagaagagaggcctgatgactagaccccgccttccgctccc

SEQ ID NO: 56 - protein, 326 aa, Homo sapiens
MPPSISAFQAAYIGIEVLIALVSVPGNVLVIWAVKVNQALRDATFCFIVSLAVADVAVGALVIPLAILINIGPQTYFHTCLMVACPVLILTQSSILALLAIAVDRYLRVKIPLRYKMVVTPRRAAVAIAGCWILSFVVGLTPMFGWNNLSAVERAWAANGSMGEPVIKCEFEKVISMEYMVYFNFFVWVLPPLLLMVLIYLEVFYLIRKQLNKKVSASSGDPQKYYGKELKIAKSLALILFLFALSWLPLHILNCITLFCPSCHKPSILTYIAIFLTHGNSAMNPIVYAFRIQKFRVTFLKIWNDHFRCQPAPPIDEDLPEERPDD

SEQ ID NO: 57 - DNA, 1010 bp, Homo sapiens
  CDS (3)..(992)
caccgaattccaccatgccgccctccatctcagctttccaggccgcctacatcggcatcgaggtgctcatcgccctggtctctgtgcccgggaacgtgctggtgatctgggcggtgaaggtgaaccaggcgctgcgggatgccaccttctgcttcatcgtgtcgctggcggtggctgatgtggccgtgggtgccctggtcatccccctcgccatcctcatcaacattgggccacagacctacttccacacctgcctcatggttgcctgtccggtcctcatcctcacccagagctccatcctggccctgctggcaattgctgtggaccgctacctccgggtcaagatccctctccggtacaagatggtggtgaccccccggagggcggcggtggccatagccggctgctggatcctctccttcgtggtgggactgacccctatgtttggctggaacaatctgagtgcggtggagcgggcctgggcagccaacggcagcatgggggagcccgtgatcaagtgcgagttcgagaaggtcatcagcatggagtacatggtctacttcaacttctttgtgtgggtgctgcccccgcttctcctcatggtcctcatctacctggaggtcttctacctaatccgcaagcagctcaacaagaaggtgtcggcctcctccggcgacccgcagaagtactatgggaaggagctgaagatcgccaagtcgctggccctcatcctcttcctctttgccctcagctggctgcctttgcacatcctcaactgcatcaccctcttctgcccgtcctgccacaagcccagcatccttacctacattgccatcttcctcacgcacggcaactcggccatgaaccccattgtctatgccttccgcatccagaagttccgcgtcaccttccttaagatttggaatgaccatttccgctgccagcctgcacctcccattgacgaggatctcccagaagagaggcctgatgactagggtggcggccgctat

SEQ ID NO: 58 - protein, 330 aa, Homo sapiens
PNSTMPPSISAFQAAYIGIEVLIALVSVPGNVLVIWAVKVNQALRDATFCFIVSLAVADVAVGALVIPLAILINIGPQTYFHTCLMVACPVLILTQSSILALLAIAVDRYLRVKIPLRYKMVVTPRRAAVAIAGCWILSFVVGLTPMFGWNNLSAVERAWAANGSMGEPVIKCEFEKVISMEYMVYFNFFVWVLPPLLLMVLIYLEVFYLIRKQLNKKVSASSGDPQKYYGKELKIAKSLALILFLFALSWLPLHILNCITLFCPSCHKPSILTYIAIFLTHGNSAMNPIVYAFRIQKFRVTFLKIWNDHFRCQPAPPIDEDLPEERPDD

SEQ ID NO: 59 - DNA, 1041 bp, Homo sapiens
  CDS (15)..(989)
aaattccggccaagatggcagcaatgaggaaggcgcttccgcggcgactggtgggcttggcgtccctccgggctgtcagcacctcatctatgggcactttaccaaagcgggtgaaaattgtggaagttggtccccgagatggactacaaaatgaaaagaatatcgtatctactccagtgaaaatcaagctgatagacatgctttctgaagcaggactctctgttatagaaaccaccagctttgtgtctcctaagtgggttccccagatgggtgaccacactgaagtcttgaagggcattcagaagtttcctggcatcaactacccagtcctgaccccaaatttgaaaggcttcgaggcagcggttgctgctggagccaaggaagtagtcatctttggagctgcctcagagctcttcaccaagaagaacatcaattgttccatagaggagagttttcagaggtttgacgcaatcctgaaggcagcgcagtcagccaatatttctgtgcgggggtacgtctcctgtgctcttggctgcccttatgaagggaagatctccccagctaaagtagctgaggtcaccaagaagttctactcaatgggctgctacgagatctccctgggggacaccattggtgtgggcaccccagggatcatgaaagacatgctgtctgctgtcatgcaggaagtgcctctggctgccctggctgtccactgccatgacacctatggtcaagccctggccaacaccttgatggccctgcagatgggagtgagtgtcgtggactcttctgtggcaggacttggaggctgtccctacgcacagggggcatcaggaaacttggccacagaagacctggtctacatgctagagggcttgggcattcacacgggtgtgaatctccagaagcttctggaagctggaaactttatctgtcaagccctgaacagaaaaactagctccaaagtggctcaggctacctgtaaactctgagccccttgcccacctgaaggcctggggatgatgtggaaataaggggcat

SEQ ID NO: 60 - protein, 325 aa, Homo sapiens
MAAMRKALPRRLVGLASLRAVSTSSMGTLPKRVKIVEVGPRDGLQNEKNIVSTPVKIKLIDMLSEAGLSVIETTSFVSPKWVPQMGDHTEVLKGIQKFPGINYPVLTPNLKGFEAAVAAGAKEVVIFGAASELFTKKNINCSIEESFQRFDAILKAAQSANISVRGYVSCALGCPYEGKISPAKVAEVTKKFYSMGCYEISLGDTIGVGTPGIMKDMLSAVMQEVPLAALAVHCHDTYGQALANTLMALQMGVSVVDSSVAGLGGCPYAQGASGNLATEDLVYMLEGLGIHTGVNLQKLLEAGNFICQALNRKTSSKVAQATCKL

SEQ ID NO: 61 - DNA, 982 bp, Homo sapiens
  CDS (64)..(966)
taactttattattaaaaattaaagaggtatatattaatgtatcgattaaataaggaggaataaaccatgggcactttaccaaagcgggtgaaaattgtggaagttggtccccgagatggactacaaaatgaaaagaatatcgtatctactccagtgaaaatcaagctgatagacatgctttctgaagcaggactctctgttatagaaaccaccagctttgtgtctcctaagtgggttccccagatgggtgaccacactgaagtcttgaagggcattcagaagtttcctggcatcaactacccagtcctgaccccaaatttgaaaggcttcgaggcagcggttgctgctggagccaaggaagtagtcatctttggagctgcctcagagctcttcaccaagaagaacatcaattgttccatagaggagagttttcagaggtttgacgcaatcctgaaggcagcgcagtcagccaatatttctgtgcgggggtacgtctcctgtgctcttggctgcccttatgaagggaagatctccccagctaaagtagctgaggtcaccaagaagttctactcaatgggctgctacgagatctccctgggggacaccattggtgtgggcaccccagggatcatgaaagacatgctgtctgctgtcatgcaggaagtgcctctggctgccctggctgtccactgccatgacacctatggtcaagccctggccaacaccttgatggccctgcagatgggagtgagtgtcgtggactcttctgtggcaggacttggaggctgtccctacgcacagggggcatcaggaaacttggccacagaagacctggtctacatgctagagggcttgggcattcacacgggtgtgaatctccagaagcttctggaagctggaaactttatctgtcaagccctgaacagaaaaactagctccaaagtggctcaggctacctctaaactctgatctagaacaaaaa

SEQ ID NO: 62 - protein, 301 aa, Homo sapiens
TMGTLPKRVKIVEVGPRDGLQNEKNIVSTPVKIKLIDMLSEAGLSVIETTSFVSPKWVPQMGDHTEVLKGIQKFPGINYPVLTPNLKGFEAAVAAGAKEVVIFGAASELFTKKNINCSIEESFQRFDAILKAAQSANISVRGYVSCALGCPYEGKISPAKVAEVTKKFYSMGCYEISLGDTIGVGTPGIMKDMLSAVMQEVPLAALAVHCHDTYGQALANTLMALQMGVSVVDSSVAGLGGCPYAQGASGNLATEDLVYMLEGLGIHTGVNLQKLLEAGNFICQALNRKTSSKVAQATSKL

SEQ ID NO: 63 - DNA, 1568 bp, Homo sapiens
  CDS (15)..(989)
gaattccggccaagatggcagcaatgaggaaggcgcttccgcggcgactggtgggcttggcgtccctccgggctgtcagcacctcatctatgggcactttaccaaagcgggtgaaaattgtggaagttggtccccgagatggactacaaaatgaaaagaatatcgtatctactccagtgaaaatcaagctgatagacatgctttctgaagcaggactctctgttatagaaaccaccagctttgtgtctcctaagtgggttccccagatgggtgaccacactgaagtcttgaagggcattcagaagtttcctggcatcaactacccagtcctgaccccaaatttgaaaggcttcgaggcagcggttgctgctggagccaaggaagtagtcatctttggagctgcctcagagctcttcaccaagaagaacatcaattgttccatagaggagagttttcagaggtttgacgcaatcctgaaggcagcgcagtcagccaatatttctgtgcgggggtacgtctcctgtgctcttggctgcccttatgaagggaagatctccccagctaaagtagctgaggtcaccaagaagttctactcaatgggctgctacgagatctccctgggggacaccattggtgtgggcaccccagggatcatgaaagacatgctatctgctgtcatgcaggaagtgcctctggctgccctggctgtccactgccatgacacctatggtcaagccctgaccaacaccttgatggccctgcagatgggagtgagtgtcgtggactcttctgtggcaggacttggaggctgtccctacgcacagggggcatcaggaaacttggccacagaagacctggtctacatgctagagggcttgggcattcacacgggtgtgaatctccagaagcttctggaagctggaaactttatctgtcaagccctgaacagaaaaactagctccaaagtggctcaggctacctgtaaactctgagccccttgcccacctgaagccctggggatgatgtggaaataggggcacacacagatgattcatggatggggacatggaaatgagaataggttaaatggtgcaggtacctcatagccagctctacacagaggtctctcctggcagaaagcaggcgaagggcaggaggagctgcttggcagaaggacctcctgcccagacctgaggagtgagaggctttgagggctgaagtctccctttgttacggaccctggcccaggagttgaatgcctgaggacgtgtgggaaccccgttccctacttagcatgatccttgagtctcctctctggatggaatccgcgagctggccacctggccaccctctacacggctccaccctgccatggccgtggggcccttgctctctgacttctcaggacacaggtcatggaggttcttcccaagctggcagaggccatttgtggaaagtggagagctacgtggtggccgtctgccaactccagcatctctggaaaatctccacgctgaatgtgatttttgaaaacagcttatgtaattaaaggttgaatggcacatcat

SEQ ID NO: 64 - protein, 325 aa, Homo sapiens
MAAMRKALPRRLVGLASLRAVSTSSMGTLPKRVKIVEVGPRDGLQNEKNIVSTPVKIKLIDMLSEAGLSVIETTSFVSPKWVPQMGDHTEVLKGIQKFPGINYPVLTPNLKGFEAAVAAGAKEVVIFGAASELFTKKNINCSIEESFQRFDAILKAAQSANISVRGYVSCALGCPYEGKISPAKVAEVTKKFYSMGCYEISLGDTIGVGTPGIMKDMLSAVMQEVPLAALAVHCHDTYGQALTNTLMALQMGVSVVDSSVAGLGGCPYAQGASGNLATEDLVYMLEGLGIHTGVNLQKLLEAGNFICQALNRKTSSKVAQATCKL

SEQ ID NO: 65 - DNA, 1355 bp, Homo sapiens
  CDS (15)..(776)
gaattccggccaagatggcagcaatgaggaaggcgcttccgcggcgactggtgggcttggcgtccctccgggctgtcagcacctcatctatgggcactttaccaaagcgggtgaaaattgtggaagttggtccccgagatggactacaaaatgaaaagaatatcgtatctactccagtgaaaatcaagctgatagacatgctttctgaagcaggactctctgttatagaaaccaccagctttgtgtctcctaagtgggttccccagatgggtgaccacactgaagtcttgaagggcattcagaagtttcctggcatcaactacccagtcctgaccccaaatttgaaaggcttcgaggcagcggtcaccaagaagttctactcaatgggctgctacgagatctccctgggggacaccattggtgtgggcaccccagggatcatgaaagacatgctgtctgctgtcatgcaggaagtgcctctggctgccctggctgtccactgccatgacacctatggtcaagccctggccaacaccttgatggccctgcagatgggagtgagtgtcgtggactcttctgtggcaggacttggaggctgtccctacgcacagggggcatcaggaaacttggccacagaagacctggtctacatgctagagggcttgggcattcacacgggtgtgaatctccagaagcttctggaagctggaaactttatctgtcaagccctgaacagaaaaactagctccaaagtggctcaggctacctgtaaactctgagccccttgcccacctgaagccctggggatgatgtggaaataggggcacacacagatgattcatggatggggacatggaaatgagaataggttaaatggtgcaggtacctcatagccagctctacacagaggtctctcctggcagaaagcaggcgaagggcaggaggagctgcttggcagaaggacctcctgcccagacctgaggagtgagaggctttgagggctgaagtctccctttgttacggaccctggcccaggagttgaatgcctgaggacgtgtgggaaccccgttccctacttagcatgatccttgagtctcctctctggatggaatccgcgagctggccacctggccaccctctacacggctccaccctgccatggccgtggggcccttgctctctgacttctcaggacacaggtcatggaggttcttcccaagctggcagaggccatttgtggaaagtggagagctacgtggtggccgtctgccaactccagcatctctggaaaatctccacgctgaatgtgatttttgaaaacagcttatgtaattaaaggttgaatggcacatcat

SEQ ID NO: 66 - protein, 254 aa, Homo sapiens
MAAMRKALPRRLVGLASLRAVSTSSMGTLPKRVKIVEVGPRDGLQNEKNIVSTPVKIKLIDMLSEAGLSVIETTSFVSPKWVPQMGDHTEVLKGIQKFPGINYPVLTPNLKGFEAAVTKKFYSMGCYEISLGDTIGVGTPGIMKDMLSAVMQEVPLAALAVHCHDTYGQALANTLMALQMGVSVVDSSVAGLGGCPYAQGASGNLATEDLVYMLEGLGIHTGVNLQKLLEAGNFICQALNRKTSSKVAQATCKL

SEQ ID NO: 67 - DNA, 788 bp, Homo sapiens
  CDS (2)..(763)
gatggcagcaatgaggaaggcgcttccgcggcgactggtgggcttggcgtccctccgggctgtcagcacctcatctatgggcactttaccaaagcgggtgaaaattgtggaagttggtccccgagatggactacaaaatgaaaggaatatcgtatctactccagtgaaaatcaagctgatagacatgctttctgaagcaggactctctgttatagaaaccaccagctttgtgtctcctaagtgggttccccagatgggtgaccacactgaagtcttgaagggcattcagaagtttcctggcatcaactacccagtcctgaccccaaatttgaaaggcttcgaggcagcggtcaccaagaagttctactcaatgggctgctacgagatctccctgggggacaccattggtgtgggcaccccagggatcatgaaagacatgctgtctgctgtcatgcaggaagtgcctctggctgccctggctgtccactgccatgacacctatggtcaagccctggccaacaccttgatggccctgcagatgggagtgagtgtcgtggactcttctgtggcaggacttggaggctgtccctacgcacagggggcatcaggaaacttggccacagaagacctggtctacatgctagagggcttgggcattcacacgggtgtgaatctccagaagcttctggaagctggaaactttatctgtcaagccctgaacagaaaaactagctccaaagtggctcaggctacctgtaaactctgagccccttgcccacctgaagccc

SEQ ID NO: 68 - protein, 254 aa, Homo sapiens
MAAMRKALPRRLVGLASLRAVSTSSMGTLPKRVKIVEVGPRDGLQNERNIVSTPVKIKLIDMLSEAGLSVIETTSFVSPKWVPQMGDHTEVLKGIQKFPGINYPVLTPNLKGFEAAVTKKFYSMGCYEISLGDTIGVGTPGIMKDMLSAVMQEVPLAALAVHCHDTYGQALANTLMALQMGVSVVDSSVAGLGGCPYAQGASGNLATEDLVYMLEGLGIHTGVNLQKLLEAGNFICQALNRKTSSKVAQATCKL

SEQ ID NO: 69 - DNA, 893 bp, Homo sapiens
  CDS (2)..(868)
gatggcagcaatgaggaaggcgcttccgcggcgactggtgggcttggcgtccctccgggctgtcagcaccttatctatgggcactttaccaaagcgggtgaaaattgtggaagttggtccccgagatggactacaaaatgaaaagaatatcgtatctactccagtgaaaatcaagctgatagacatgctttctgaagcaggactctctgttatagaaaccaccagctttgtgtctcctaagtgggttccccagatgggtgaccacactgaagtcttgaagggcattcagaagtttcctggcatcaactacccagtcctgaccccaaatttgaaaggcttcgaggcagcggttgctgctggagccaaggaagtagtcatctttggagctgcctcagagctcttcaccaagaagaacatcaattgttccatagaggagagttttcagaggtttgacgcaatcctgaaggcagcgcagtcagccaatatttctgtgcgggggtacgtctcctgtgctcttggctgcccttatgaagggaagatctccccagctaaagtagctgaggaagtgcctctggctgccctggctgtccactgccatgacacctatggtcaagccctggccaacaccttgatggccctgcagatgggagtgagtgtcgtggactcttctgtggcaggacttggaggctgtccctacgcacagggggcatcaggaaacttggccacagaagacctggtctacatgctagagggcttgggcattcacacgggtgtgaatctccagaagcttctggaagctggaaactttatctgtcaagccctgaacagaaaaactagctccaaagtggctcaggctacctgtaaactctgagccccttgcccacctgaagccc

SEQ ID NO: 70 - protein, 289 aa, Homo sapiens
MAAMRKALPRRLVGLASLRAVSTLSMGTLPKRVKIVEVGPRDGLQNEKNIVSTPVKIKLIDMLSEAGLSVIETTSFVSPKWVPQMGDHTEVLKGIQKFPGINYPVLTPNLKGFEAAVAAGAKEVVIFGAASELFTKKNINCSIEESFQRFDAILKAAQSANISVRGYVSCALGCPYEGKISPAKVAEEVPLAALAVHCHDTYGQALANTLMALQMGVSVVDSSVAGLGGCPYAQGASGNLATEDLVYMLEGLGIHTGVNLQKLLEAGNFICQALNRKTSSKVAQATCKL

SEQ ID NO: 71 - DNA, 1353 bp, Homo sapiens
  CDS (202)..(1170)
ccccaaaattcgtaacaactccgccccattgacgcaaatgggcggtaggcgtgtacggtgggaggtctatataagcagagctctctggctaactagagaacccactgcttactggcttatcgaaattaatacgactcactatagggagacccaagctggctagcgtttaaacttaagcttggtaccgagctcggatccaccatggcagcaatgaggaaggcgcttccgcggcgactggtgggcttggcgtccctccgggctgtcagcacctcatctatgggcactttaccaaagcgggtgaaaattgtggaagttggtccccgagatggactacaaaatgaaaagaatatcgtatctactccagtgaaaatcaagctgatagacatgctttctgaagcaggactctctgttatagaaaccaccagctttgtgtctcctaagtgggttccccagatgggtgaccacactgaagtcttgaagggcattcagaagtttcctggcatcaactacccagtcctgaccccaaatttgaaaggcttcgaggcagcggttgctgctggagccaaggaagtagtcatctttggagctgcctcagagctcttcaccaagaagaacatcaattgttccatagaggagagttttcagaggtttgacgcaatcctgaaggcagcgcagtcagccaatatttctgtgcgggggtacgtctcctgtgctcttggctgcccttatgaagggaagatctccccagctaaagtagctgaggtcaccaagaagttctactcaatgggctgctacgagatctccctgggggacaccattggtgtgggcaccccagggatcatgaaagacatgctgtctgctgtcatgcaggaagtgcctctggctgccctggctgtccactgccatgacacctatggtcaagccctggccaacaccttgatggccctgcagatgggagtgagtgtcgtggactcttctgtggcaggacttggaggctgtccctacgcacagggggcatcaggaaacttggccacagaagacctggtctacatgctagagggcttgggcattcacacgggtgtgaatctccagaagcttctggaagctggaaactttatctgtcaagccctgaacagaaaaactagctccaaagtggctcaggctacctgtaaactctgagcggccgctcgagtctagagggcccgtttaaacccgctgatcagcctcgactgtgccttctagttgccagccatctgttgtttgcccctcccccgtgccttccttgaccctggaaggtgccactcccactgtcctttcctaataaaatgaggaaattgcatcgcattgtctgag

SEQ ID NO: 72 - protein, 323 aa, Homo sapiens
MAAMRKALPRRLVGLASLRAVSTSSMGTLPKRVKIVEVGPRDGLQNEKNIVSTPVKIKLIDMLSEAGLSVIETTSFVSPKWVPQMGDHTEVLKGIQKFPGINYPVLTPNLKGFEAAVAAGAKEVVIFGAASELFTKKNINCSIEESFQRFDAILKAAQSANISVRGYVSCALGCPYEGKISPAKVAEVTKKFYSMGCYEISLGDTIGVGTPGIMKDMLSAVMQEVPLAALAVHCHDTYGQALANTLMALQMGVSVVDSSVAGLGGCPYAQGASGNLATEDLVYMLEGLGIHTGVNLQKLLEAGNFICQALNRKTSSKVAQATC

SEQ ID NO: 73 - DNA, 969 bp, Homo sapiens
  CDS (64)..(966)
taactttattattaaaaattaaagaggtatatattaatgtatcgattaaataaggaggaataaaccatgggcactttaccaaagcgggtgaaaattgtggaagttggtccccgagatggactacaaaatgaaaagaatatcgtatctactccagtgaaaatcaagctgatagacatgctttctgaagcaggactctctgttatagaaaccaccagctttgtgtctcctaagtgggttccccagatgggtgaccacactgaagtcttgaagggcattcagaagtttcctggcatcaactacccagtcctgaccccaaatttgaaaggcttcgaggcagcggttgctgctggagccaaggaagtagtcatctttggagctgcctcagagctcttcaccaagaagaacatcaattgttccatagaggagagttttcagaggtttgacgcaatcctgaaggcagcgcagtcagccaatatttctgtgcgggggtacgtctcctgtgctcttggctgcccttatgaagggaagatctccccagctaaagtagctgaggtcaccaagaagttctactcaatgggctgctacgagatctccctgggggacaccattggtgtgggcaccccagggatcatgaaagacatgctgtctgctgtcatgcaggaagtgcctctggctgccctggctgtccactgccatgacacctatggtcaagccctggccaacaccttgatggccctgcagatgggagtgagtgtcgtggactcttctgtggcaggacttggaggctgtccctacgcacagggggcatcaggaaacttggccacagaagacctggtctacatgctagagggcttgggcattcacacgggtgtgaatctccagaagcttctggaagctggaaactttatctgtcaagccctgaacagaaaaactagctccaaagtggctcaggctacctgtaaactctga

SEQ ID NO: 74 - protein, 301 aa, Homo sapiens
TMGTLPKRVKIVEVGPRDGLQNEKNIVSTPVKIKLIDMLSEAGLSVIETTSFVSPKWVPQMGDHTEVLKGIQKFPGINYPVLTPNLKGFEAAVAAGAKEVVIFGAASELFTKKNINCSIEESFQRFDAILKAAQSANISVRGYVSCALGCPYEGKISPAKVAEVTKKFYSMGCYEISLGDTIGVGTPGIMKDMLSAVMQEVPLAALAVHCHDTYGQALANTLMALQMGVSVVDSSVAGLGGCPYAQGASGNLATEDLVYMLEGLGIHTGVNLQKLLEAGNFICQALNRKTSSKVAQATCKL

SEQ ID NO: 75 - DNA, 969 bp, Homo sapiens; identical to SEQ ID NO: 73
  CDS (64)..(966)

SEQ ID NO: 76 - protein, 301 aa, Homo sapiens; identical to SEQ ID NO: 74

SEQ ID NO: 77 - DNA, 987 bp, Homo sapiens
  CDS (64)..(984)
taactttattattaaaaattaaagaggtatatattaatgtatcgattaaataaggaggaataaaccatgggccaccatcaccaccatcacactttaccaaagcgggtgaaaattgtggaagttggtccccgagatggactacaaaatgaaaagaatatcgtatctactccagtgaaaatcaagctgatagacatgctttctgaagcaggactctctgttatagaaaccaccagctttgtgtctcctaagtgggttccccagatgggtgaccacactgaagtcttgaagggcattcagaagtttcctggcatcaactacccagtcctgaccccaaatttgaaaggcttcgaggcagcggttgctgctggagccaaggaagtagtcatctttggagctgcctcagagctcttcaccaagaagaacatcaattgttccatagaggagagttttcagaggtttgacgcaatcctgaaggcagcgcagtcagccaatatttctgtgcgggggtacgtctcctgtgctcttggctgcccttatgaagggaagatctccccagctaaagtagctgaggtcaccaagaagttctactcaatgggctgctacgagatctccctgggggacaccattggtgtgggcaccccagggatcatgaaagacatgctgtctgctgtcatgcaggaagtgcctctggctgccctggctgtccactgccatgacacctatggtcaagccctggccaacaccttgatggccctgcagatgggagtgagtgtcgtggactcttctgtggcaggacttggaggctgtccctacgcacagggggcatcaggaaacttggccacagaagacctggtctacatgctagagggcttgggcattcacacgggtgtgaatctccagaagcttctggaagctggaaactttatctgtcaagccctgaacagaaaaactagctccaaagtggctcaggctacctgtaaactctga

SEQ ID NO: 78 - protein, 307 aa, Homo sapiens
TMGHHHHHHTLPKRVKIVEVGPRDGLQNEKNIVSTPVKIKLIDMLSEAGLSVIETTSFVSPKWVPQMGDHTEVLKGIQKFPGINYPVLTPNLKGFEAAVAAGAKEVVIFGAASELFTKKNINCSIEESFQRFDAILKAAQSANISVRGYVSCALGCPYEGKISPAKVAEVTKKFYSMGCYEISLGDTIGVGTPGIMKDMLSAVMQEVPLAALAVHCHDTYGQALANTLMALQMGVSVVDSSVAGLGGCPYAQGASGNLATEDLVYMLEGLGIHTGVNLQKLLEAGNFICQALNRKTSSKVAQATCKL

SEQ ID NO: 79 - DNA, 2070 bp, Homo sapiens
  CDS (119)..(1984)
gaacacaaacttgctggcgggaagagcccggaaagaaacctgtggatctcccttcgagatcatccaaagagaagaaaggtgacctcacattcgtgccccttagcagcactctgcagaaatgcctcctcagctgcaaaacggcctgaacctctcggccaaagttgtccagggaagcctggacagcctaccccaggcagtgagggagtttctcgagaataacgctgagctgtgtcagcctgatcacatccacatctgtgacggctctgaggaggagaatgggcggcttctgggccagatggaggaagagggcatcctcaggcggctgaagaagtatgacaactgctggttggctctcactgaccccagggatgtggccaggatcgaaagcaagacggttatcgtcacccaagagcaaagagacacagtgcccatccccaaaacaggcctcagccagctcggtcgctggatgtcagaggaggattttgagaaagcgttcaatgccaggttcccagggtgcatgaaaggtcgcaccatgtacgtcatcccattcagcatggggccgctgggctcacctctgtcgaagatcggcatcgagctgacggattcgccctacgtggtggccagcatgcggatcatgacgcggatgggcacgcccgtcctggaagcactgggcgatggggagtttgtcaaatgcctccattctgtggggtgccctctgcctttacaaaagcctttggtcaacaactggccctgcaacccggagctgacgctcatcgcccacctgcctgaccgcagagagatcatctcctttggcagtgggtacggcgggaactcgctgctcgggaagaagtgctttgctctcaggatggccagccggctggccaaggaggaagggtggctggcagagcacatgctgattctgggtataaccaaccctgagggtgagaagaagtacctggcggccgcatttcccagcgcctgcgggaagaccaacctggccatgatgaaccccagcctccccgggtggaaggttgagtgcgtcggggatgacattgcctggatgaagtttgacgcacaaggtcatttaagggccatcaacccagaaaatggctttttcggtgtcgctcctgggacttcagtgaagaccaaccccaatgccatcaagaccatccagaagaacacaatctttaccaatgtggccgagaccagcgacgggggcgtttactgggaaggtattgatgagccgctagcttcaggcgtcaccatcacgtcctggaagaataaggagtggagctcagaggatggggaaccttgtgcccaccccaactcgaggttctgcacccctgccagccagtgccccatcattgatgctgcctgggagtctccggaaggtgttcccattgaaggcattatctttggaggccgtagacctgctggtgtccctctagtctatgaagctctcagctggcaacatggagtctttgtgggggcggccatgagatcagaggccacagcggctgcagaacataaaggcaaaatcatcatgcatgacccctttgccatgcggcccttctttggctacaacttcggcaaatacctggcccactggcttagcatggcccagcacccagcagccaaactgcccaagatcttccatgtcaactggttccggaaggacaaggaaggcaaattcctctggccaggctttggagagaactccagggtgctggagtggatgttcaaccggatcgatggaaaagccagcaccaagctcacgcccataggctacatccccaaggaggatgccctgaacctgaaaggcctggggcacatcaacatgatggagcttttcagcatctccaaggaattctgggagaaggaggtggaagacatcgagaagtatctggaggatcaagtcaatgccgacctcccctgtgaaatcgagagagagatccttgccttgaagcaaagaataagccagatgtaatcagggcctgagtgctttacctttaaaatcattccctttcccatccataaggtgcagtaggagcaagagagggcaagtgttcc

SEQ ID NO: 80 - protein, 622 aa, Homo sapiens [sequence omitted]

SEQ ID NO: 81 - DNA, 2070 bp, Homo sapiens
  CDS (119)..(1984)
gaacacaaacttgctggcgggaagagcccggaaagaaacctgtggatctcccttcgagatcatccaaagagaagaaaggtgacctcacattcgtgccccttagcagcactctgcagaaatgcctcctcagctgcaaaacggcctgaacctctcggccaaagttgtccagggaagcctggacagcctgccccaggcagtgagggagtttctcgagaataacgctgagctgtgtcagcctgatcacatccacatctgtgacggctctgaggaggagaatgggcggcttctgggccagatggaggaagagggcatcctcaggcgactgaagaagtatgacaactgctggttggctctcactgaccccagggatgtggccaggatcgaaagcaagacggttatcgtcacccaagagcaaagagacacagtgcccatccccaaaacaggcctcagccagctcggtcgctggatgtcagaggaggattttgagaaagcgttcaatgccaggttcccagggtgcatgaaaggtcgcaccatgtacgtcatcccattcagcatggggccgctgggctcacctctgtcgaagatcggcatcgagctgacggattcgccctacgtggtggccagcatgcggatcatgacgcggatgggcacgcccgtcctggaagcactgggcgatggggagtttgtcaaatgcctccattctgtggggtgccctctgcctttacaaaagcctttggtcaacaactggccctgcaacccggagctgacgctcatcgcccacctgcctgaccgcagagagatcatctcctttggcagtgggtacggcgggaactcgctgctcgggaagaagtgctttgctctcaggatggccagccggctggccaaggaggaagggtggctggcagagcacatgctgattctgggtataaccaaccctgagggtgagaagaagtacctggcggccgcatttcccagcgcctgcgggaagaccaacctggccatgatgaaccccagcctccccgggtggaaggttgagtgcgtcggggatgacattgcctggatgaagtttgacgcacaaggtcatttaagggccatcaacccagaaaatggctttttcggtgtcgctcctgggacttcagtgaagaccaaccccaatgccatcaagaccatccagaagaacacaatctttaccaatgtggccgagaccagcgacgggggcgtttactgggaaggtattgatgagccgctagcttcaggcgtcaccatcacgtcctggaagaataaggagtggagctcagaggatggggaaccttgtgcccaccccaactcgaggttctgcacccctgccagccagtgccccatcattgatgctgcctgggagtctccggaaggtgttcccattgaaggcattatctttggaggccgtagacctgctggtgtccctctagtctatgaagctctcagctggcaacatggagtctttgtgggggcggccatgagatcagaggccacagcggctgcagaacataaaggcaaaatcatcatgcatgacccctttgccatgcggcccttctttggctacaacttcggcaaatacctggcccactggcttagcatggcccagcacccagcagccaaactgcccaagatcttccatgtcaactggttccggaaggacaaggaaggcaaattcctctggccaggctttggagagaactccagggtgctggagtggatgttcaaccggatcgatggaaaagccagcaccaagctcacgcccataggctacatccccaaggaggatgccctgaacctgaaaggcctggggcacatcaacatgatggagcttttcagcatctccaaggaattctgggagaaggaggtggaagacatcgagaagtatctggaggatcaagtcaatgccgacctcccctgtgaaatcgagagagagatccttgccttgaagcaaagaataagccagatgtaatcagggcctgagtgctttacctttaaaatcattccctttcccatccataaggtgcagtaggagcaagagagggcaagtgttcc

SEQ ID NO: 82 - protein, 622 aa, Homo sapiens [sequence omitted]

SEQ ID NO: 83 - DNA, 2070 bp, Homo sapiens
  CDS (119)..(1984)
gaacacaaacttgctggcgggaagagcccggaaagaaacctgtggatctcccttcgagatcatccaaagagaagaaaggtgacctcacattcgtgccccttagcagcactctgcagaaatgcctcctcagctgcaaaacggcctgaacctctcggccaaagttgtccagggaagcctggacagcctgccccaggcagtgagggagtttctcgagaataacgctgagctgtgtcagcctgatcacatccacatctgtgacggctctgaggaggagaatgggcggcttctgggccagatggaggaagagggcatcctcaggcggctgaagaagtatgacaactgctggttggctctcactgaccccagggatgtggccaggatcgaaagcaagacggttattgtcacccaagagcaaagagacacagtgcccatccccaaaacaggcctcagccagctcggtcgctggatgtcagaggaggattttgagaaagcgttcaatgccaggttcccagggtgcatgaaaggtcgcaccatgtacgtcatcccattcagcatggggccgctgggctcacctctgtcgaagatcggcatcgagctgacggattcgccctacgtggtggccagcatgcggatcatgacgcggatgggcacgcccgtcctggaagcactgggcgatggggagtttgtcaaatgcctccattctgtggggtgccctctgcctttacaaaagcctttggtcaacaactggccctgcaacccggagctgacgctcatcgcccacctgcctgaccgcagagagatcatctcctttggcagtgggtacggcgggaactcgctgctcgggaagaagtgctttgctctcaggatggccagccggctggccaaggaggaagggtggctggcagagcacatgctgattctgggtataaccaaccctgagggtgagaagaagtacctggcggccgcatttcccagcgcctgcgggaagaccaacctggccatgatgaaccccagcctccccgggtggaaggttgagtgcgtcggggatgacattgcctggatgaagtttgacgcacaaggtcatttaagggccatcaacccagaaaatggctttttcggtgtcgctcctgggacttcagtgaagaccaaccccaatgccatcaagaccatccagaagaacacaatctttaccaatgtggccgagaccagcgacgggggcgtttactgggaaggtattgatgagccgctagcttcaggcgtcaccatcacgtcctggaagaataaggagtggagctcagaggatggggaaccttgtgcccaccccaactcgaggttctgcacccctgccagccagtgccccatcattgatgctgcctgggagtctccggaaggtgttcccattgaaggcattatctttggaggccgtagacctgctggtgtccctctagtctatgaagctctcagctggcaacatggagtctttgtgggggcggccatgagatcagaggccacagcggctgcagaacataaaggcaaaatcatcatgcatgacccctttgccatgcggcccttctttggctacaacttcggcaaatacctggcccactggcttagcatggcccagcacccagcagccaaactgcccaagatcttccatgtcaactggttccggaaggacaaggaaggcaaattcctctggccaggctttggagagaactccagggtgctggagtggatgttcaaccggatcgatggaaaagccagcaccaagctcacgcccataggctacatccccaaggaggatgccctgaacctgaaaggcctggggcacatcaacatgatggagcttttcagcatctccaaggaattctgggagaaggaggtggaagacatcgagaagtatctggaggatcaagtcaatgccgacctcccctgtgaaatcgagagagagatccttgccttgaagcaaagaataagccagatgtaatcagggcctgagtgctttacctttaaaatcattccctttcccatccataaggtgcagtaggagcaagagagggcaagtgttcc

SEQ ID NO: 84 - protein, 622 aa, Homo sapiens [sequence omitted]

SEQ ID NO: 85 - DNA, 2070 bp, Homo sapiens
  CDS (119)..(1984)
gaacacaaacttgctggcgggaagagcccggaaagaaacctgtggatctcccttcgagatcatccaaagagaagaaaggtgacctcacattcgtgccccttagcagcactctgcagaaatgcctcctcagctgcaaaacggcctgaacctctcggccaaagttgtccagggaagcctggacagcctgccccaggcagtgagggagtttctcgagaataacgctgagctgtgtcagcctgatcacatccacatctgtgacggctctgaggaggagaatgggcggcttctgggccagatggaggaagagggcatcctcaggcggctgaagaagtatgacaactgctggttggctctcactgaccccagggatgtggccaggatcgaaagcaagacggttatcgtcacccaagagcaaagagacacagtgcccatccccaaaacaggcctcagccagctcggtcgctggatgtcagaggaggattttgagaaagcgttcaatgccaggttcccagggtgcatgaaaggtcgcaccatgtacgtcatcccattcagcatggggccgctgggctcacctctgtcgaagatcggcatcgagctgacggattcgccctacgtggtggccagcatgcggatcatgacgcggatgggcacgcccgtcctggaagcagtgggcgatggggagtttgtcaaatgcctccattctgtggggtgccctctgcctttacaaaagcctttggtcaacaactggccctgcaacccggagctgacgctcatcgcccacctgcctgaccgcagagagatcatctcctttggcagtgggtacggcgggaactcgctgctcgggaagaagtgctttgctctcaggatggccagccggctggccaaggaggaagggtggctggcagagcacatgctgattctgggtataaccaaccctgagggtgagaagaagtacctggcggccgcatttcccagcgcctgcgggaagaccaacctggccatgatgaaccccagcctccccgggtggaaggttgagtgcgtcggggatgacattgcctggatgaagtttgacgcacaaggtcatttaagggccatcaacccagaaaatggctttttcggtgtcgctcctgggacttcagtgaagaccaaccccaatgccatcaagaccatccagaagaacacaatctttaccaatgtggccgagaccagcgacgggggcgtttactgggaaggtattgatgagccgctagcttcaggcgtcaccatcacgtcctggaagaataaggagtggagctcagaggatggggaaccttgtgcccaccccaactcgaggttctgcacccctgccagccagtgccccatcattgatgctgcctgggagtctccggaaggtgttcccattgaaggcattatctttggaggccgtagacctgctggtgtccctctagtctatgaagctctcagctggcaacatggagtctttgtgggggcggccatgagatcagaggccacagcggctgcagaacataaaggcaaaatcatcatgcatgacccctttgccatgcggcccttctttggctacaacttcggcaaatacctggcccactggcttagcatggcccagcacccagcagccaaactgcccaagatcttccatgtcaactggttccggaaggacaaggaaggcaaattcctctggccaggctttggagagaactccagggtgctggagtggatgttcaaccggatcgatggaaaagccagcaccaagctcacgcccataggctacatccccaaggaggatgccctgaacctgaaaggcctggggcacatcaacatgatggagcttttcagcatctccaaggaattctgggagaaggaggtggaagacatcgagaagtatctggaggatcaagtcaatgccgacctcccctgtgaaatcgagagagagatccttgccttgaagcaaagaataagccagatgtaatcagggcctgagtgctttacctttaaaatcattccctttcccatccataaggtgcagtaggagcaagagagggcaagtgttcc

SEQ ID NO: 86 - protein, 622 aa, Homo sapiens
MPPQLQNGLNLSAKVVQGSLDSLPQAVREFLENNAELCQPDHIHICDGSEEENGRLLGQMEEEGILRRLKKYDNCWLALTDPRDVARIESKTVIVTQEQRDTVPIPKTGLSQLGRWMSEEDFEKAFNARFPGCMKGRTMYVIPFSMGPLGSPLSKIGIELTDSPYVVASMRIMTRMGTPVLEAVGDGEFVKCLHSVGCPLPLQKPLVNNWPCNPELTLIAHLPDRREIISFGSGYGGNSLLGKKCFALRMASRLAKEEGWLAEHMLILGITNPEGEKKYLAAAFPSACGKTNLAMMNPSLPGWKVECVGDDIAWMKFDAQGHLRAINPENGFFGVAPGTSVKTNPNAIKTIQKNTIFTNVAETSDGGVYWEGIDEPLASGVTITSWKNKEWSSEDGEPCAHPNSRFCTPASQCPIIDAAWESPEGVPIEGIIFGGRRPAGVPLVYEALSWQHGVFVGAAMRSEATAAAEHKGKIIMHDPFAMRPFFGYNFGKYLAHWLSMAQHPAAKLPKIFHVNWFRKDKEGKFLWPGFGENSRVLEWMFNRIDGKASTKLTPIGYIPKEDALNLKGLGHINMMELFSISKEFWEKEVEDIEKYLEDQVNADLPCEIEREILALKQRISQM

SEQ ID NO: 87 - DNA, 2070 bp, Homo sapiens
  CDS (119)..(1984)
gaacacaaacttgctggcgggaagagcccggaaagaaacctgtggatctcccttcgagatcatccaaagagaagaaaggtgacctcacattcgtgccccttagcagcactctgcagaaatgcctcctcagctgcaaaacggcctgaacctctcggccaaagttgtccagggaagcctggacagcctgccccaggcagtgagggagtttctcgagaataacgctgagctgtgtcagcctgatcacatccacatctgtgacggctctgaggaggagaatgggcggcttctgggccagatggaggaagagggcatcctcaggcggctgaagaagtatgacaactgctggttggctctcactgaccccagggatgtggccaggatcgaaagcaagacggttatcgtcacccaagagcaaagagacacagtgcccatccccaaaacaggcctcagccagctcggtcgctggatgtcagaggaggattttgagaaagcgttcaatgccaggttcccagggtgcatgaaaggtcgcaccatgtacgtcatcccattcagcatggggccgctgggctcacctctgtcgaagatcggcatcgagctgacggattcgccctacgtggtggccagcatgcggatcatgacgcggatgggcacgcccgtcctggaagcactgggcgatggggagtttgtcaaatgcctccattctgtggggtgccctctgcctttacaaaagcctttggtcaacaactggccctgcaacccggagctgacgctcatcgcccacctgcctgaccgcagagagatcatctcctttggcagtgggtacggcgggaactcgctgctcgggaagaagtgctttgctctcaggatagccagccggctggccaaggaggaagggtggctggcagagcacatgctgattctgggtataaccaaccctgagggtgagaagaagtacctggcggccgcatttcccagcgcctgcgggaagaccaacctggccatgatgaaccccagcctccccgggtggaaggttgagtgcgtcggggatgacattgcctggatgaagtttgacgcacaaggtcatttaagggccatcaacccagaaaatggctttttcggtgtcgctcctgggacttcagtgaagaccaaccccaatgccatcaagaccatccagaagaacacaatctttaccaatgtggccgagaccagcgacgggggcgtttactgggaaggtattgatgagccgctagcttcaggcgtcaccatcacgtcctggaagaataaggagtggagctcagaggatggggaaccttgtgcccaccccaactcgaggttctgcacccctgccagccagtgccccatcattgatgctgcctgggagtctccggaaggtgttcccattgaaggcattatctttggaggccgtagacctgctggtgtccctctagtctatgaagctctcagctggcaacatggagtctttgtgggggcggccatgagatcagaggccacagcggctgcagaacataaaggcaaaatcatcatgcatgacccctttgccatgcggcccttctttggctacaacttcggcaaatacctggcccactggcttagcatggcccagcacccagcagccaaactgcccaagatcttccatgtcaactggttccggaaggacaaggaaggcaaattcctctggccaggctttggagagaactccagggtgctggagtggatgttcaaccggatcgatggaaaagccagcaccaagctcacgcccataggctacatccccaaggaggatgccctgaacctgaaaggcctggggcacatcaacatgatggagcttttcagcatctccaaggaattctgggagaaggaggtggaagacatcgagaagtatctggaggatcaagtcaatgccgacctcccctgtgaaatcgagagagagatccttgccttgaagcaaagaataagccagatgtaatcagggcctgagtgctttacctttaaaatcattccctttcccatccataaggtgcagtaggagcaagagagggcaagtgttcc

SEQ ID NO: 88 - protein, 622 aa, Homo sapiens
MPPQLQNGLNLSAKVVQGSLDSLPQAVREFLENNAELCQPDHIHICDGSEEENGRLLGQMEEEGILRRLKKYDNCWLALTDPRDVARIESKTVIVTQEQRDTVPIPKTGLSQLGRWMSEEDFEKAFNARFPGCMKGRTMYVIPFSMGPLGSPLSKIGIELTDSPYVVASMRIMTRMGTPVLEALGDGEFVKCLHSVGCPLPLQKPLVNNWPCNPELTLIAHLPDRREIISFGSGYGGNSLLGKKCFALRIASRLAKEEGWLAEHMLILGITNPEGEKKYLAAAFPSACGKTNLAMMNPSLPGWKVECVGDDIAWMKFDAQGHLRAINPENGFFGVAPGTSVKTNPNAIKTIQKNTIFTNVAETSDGGVYWEGIDEPLASGVTITSWKNKEWSSEDGEPCAHPNSRFCTPASQCPIIDAAWESPEGVPIEGIIFGGRRPAGVPLVYEALSWQHGVFVGAAMRSEATAAAEHKGKIIMHDPFAMRPFFGYNFGKYLAHWLSMAQHPAAKLPKIFHVNWFRKDKEGKFLWPGFGENSRVLEWMFNRIDGKASTKLTPIGYIPKEDALNLKGLGHINMMELFSISKEFWEKEVEDIEKYLEDQVNADLPCEIEREILALKQRISQM

SEQ ID NO: 89 - DNA, 2070 bp, Homo sapiens
  CDS (119)..(1984)
gaacacaaacttgctggcgggaagagcccggaaagaaacctgtggatctcccttcgagatcatccaaagagaagaaaggtgacctcacattcgtgccccttagcagcactctgcagaaatgcctcctcagctgcaaaacggcctgaacctctcggccaaagttgtccagggaagcctggacagcctgccccaggcagtgagggagtttctcgagaataacgctgagctgtgtcagcctgatcacatccacatctgtgacggctctgaggaggagaatgggcggcttctgggccagatggaggaagagggcatcctcaggcggctgaagaagtatgacaactgctggttggctctcactgaccccagggatgtggccaggatcgaaagcaagacggttatcgtcacccaagagcaaagagacacagtgcccatccccaaaacaggcctcagccagctcggtcgctggatgtcagaggaggattttgagaaagcgttcaatgccaggttcccagggtgcatgaaaggtcgcaccatgtacgtcatcccattcagcatggggccgctgggctcacctctgtcgaagatcggcatcgagctgacggattcgccctacgtggtggccagcatgcggatcatgacgcggatgggcacgcccgtcctggaagcactgggcgatggggagtttgtcaaatgcctccattctgtggggtgccctctgcctttacaaaagcctttggtcaacaactggccctgcaacccggagctgacgctcatcgcccacctgcctgaccgcagagagatcatctcctttggcagtgggtacggcgggaactcgctgctcgggaagaagtgctttgctctcaggatggccagccggctggccaaggaggaagggtggctggcagagcacatgctggttctgggtataaccaaccctgagggtgagaagaagtacctggcggccgcatttcccagcgcctgcgggaagaccaacctggccatgatgaaccccagcctccccgggtggaaggttgagtgcgtcggggatgacattgcctggatgaagtttgacgcacaaggtcatttaagggccatcaacccagaaaatggctttttcggtgtcgctcctgggacttcagtgaagaccaaccccaatgccatcaagaccatccagaagaacacaatctttaccaatgtggccgagaccagcgacgggggcgtttactgggaaggtattgatgagccgctagcttcaggcgtcaccatcacgtcctggaagaataaggagtggagctcagaggatggggaaccttgtgcccaccccaactcgaggttctgcacccctgccagccagtgccccatcattgatgctgcctgggagtctccggaaggtgttcccattgaaggcattatctttggaggccgtagacctgctggtgtccctctagtctatgaagctctcagctggcaacatggagtctttgtgggggcggccatgagatcagaggccacagcggctgcagaacataaaggcaaaatcatcatgcatgacccctttgccatgcggcccttctttggctacaacttcggcaaatacctggcccactggcttagcatggcccagcacccagcagccaaactgcccaagatcttccatgtcaactggttccggaaggacaaggaaggcaaattcctctggccaggctttggagagaactccagggtgctggagtggatgttcaaccggatcgatggaaaagccagcaccaagctcacgcccataggctacatccccaaggaggatgccctgaacctgaaaggcctggggcacatcaacatgatggagcttttcagcatctccaaggaattctgggagaaggaggtggaagacatcgagaagtatctggaggatcaagtcaatgccgacctcccctgtgaaatcgagagagagatccttgccttgaagcaaagaataagccagatgtaatcagggcctgagtgctttacctttaaaatcattccctttcccatccataaggtgcagtaggagcaagagagggcaagtgttcc

SEQ ID NO: 90 - protein, 622 aa, Homo sapiens
MPPQLQNGLNLSAKVVQGSLDSLPQAVREFLENNAELCQPDHIHICDGSEEENGRLLGQMEEEGILRRLKKYDNCWLALTDPRDVARIESKTVIVTQEQRDTVPIPKTGLSQLGRWMSEEDFEKAFNARFPGCMKGRTMYVIPFSMGPLGSPLSKIGIELTDSPYVVASMRIMTRMGTPVLEALGDGEFVKCLHSVGCPLPLQKPLVNNWPCNPELTLIAHLPDRREIISFGSGYGGNSLLGKKCFALRMASRLAKEEGWLAEHMLVLGITNPEGEKKYLAAAFPSACGKTNLAMMNPSLPGWKVECVGDDIAWMKFDAQGHLRAINPENGFFGVAPGTSVKTNPNAIKTIQKNTIFTNVAETSDGGVYWEGIDEPLASGVTITSWKNKEWSSEDGEPCAHPNSRFCTPASQCPIIDAAWESPEGVPIEGIIFGGRRPAGVPLVYEALSWQHGVFVGAAMRSEATAAAEHKGKIIMHDPFAMRPFFGYNFGKYLAHWLSMAQHPAAKLPKIFHVNWFRKDKEGKFLWPGFGENSRVLEWMFNRIDGKASTKLTPIGYIPKEDALNLKGLGHINMMELFSISKEFWEKEVEDIEKYLEDQVNADLPCEIEREILALKQRISQM

SEQ ID NO: 91 - DNA, 2070 bp, Homo sapiens
  CDS (119)..(1984)
gaacacaaacttgctggcgggaagagcccggaaagaaacctgtggatctcccttcgagatcatccaaagagaagaaaggtgacctcacattcgtgccccttagcagcactctgcagaaatgcctcctcagctgcaaaacggcctgaacctctcggccaaagttgtccagggaagcctggacagcctgccccaggcagtgagggagtttctcgagaataacgctgagctgtgtcagcctgatcacatccacatctgtgacggctctgaggaggagaatgggcggcttctgggccagatggaggaagagggcatcctcaggcggctgaagaagtatgacaactgctggttggctctcactgaccccagggatgtggccaggatcgaaagcaagacggttatcgtcacccaagagcaaagagacacagtgcccatccccaaaacaggcctcagccagctcggtcgctggatgtcagaggaggattttgagaaagcgttcaatgccaggttcccagggtgcatgaaaggtcgcaccatgtacgtcatcccattcagcatggggccgctgggctcacctctgtcgaagatcggcatcgagctgacggattcgccctacgtggtggccagcatgcggatcatgacgcggatgggcacgcccgtcctggaagcactgggcgatggggagtttgtcaaatgcctccattctgtggggtgccctctgcctttacaaaagcctttggtcaacaactggccctgcaacccggagctgacgctcatcgcccacctgcctgaccgcagagagatcatctcctttggcagtgggtacggcgggaactcgctgctcgggaagaagtgctttgctctcaggatggccagccggctggccaaggaggaagggtggctggcagagcacatgctgattctgggtataaccaaccctgagggtaagaagaagtacctggcggccgcatttcccagcgcctgcgggaagaccaacctggccatgatgaaccccagcctccccgggtggaaggttgagtgcgtcggggatgacattgcctggatgaagtttgacgcacaaggtcatttaagggccatcaacccagaaaatggctttttcggtgtcgctcctgggacttcagtgaagaccaaccccaatgccatcaagaccatccagaagaacacaatctttaccaatgtggccgagaccagcgacgggggcgtttactgggaaggtattgatgagccgctagcttcaggcgtcaccatcacgtcctggaagaataaggagtggagctcagaggatggggaaccttgtgcccaccccaactcgaggttctgcacccctgccagccagtgccccatcattgatgctgcctgggagtctccggaaggtgttcccattgaaggcattatctttggaggccgtagacctgctggtgtccctctagtctatgaagctctcagctggcaacatggagtctttgtgggggcggccatgagatcagaggccacagcggctgcagaacataaaggcaaaatcatcatgcatgacccctttgccatgcggcccttctttggctacaacttcggcaaatacctggcccactggcttagcatggcccagcacccagcagccaaactgcccaagatcttccatgtcaactggttccggaaggacaaggaaggcaaattcctctggccaggctttggagagaactccagggtgctggagtggatgttcaaccggatcgatggaaaagccagcaccaagctcacgcccataggctacatccccaaggaggatgccctgaacctgaaaggcctggggcacatcaacatgatggagcttttcagcatctccaaggaattctgggagaaggaggtggaagacatcgagaagtatctggaggatcaagtcaatgccgacctcccctgtgaaatcgagagagagatccttgccttgaagcaaagaataagccagatgtaatcagggcctgagtgctttacctttaaaatcattccctttcccatccataaggtgcagtaggagcaagagagggcaagtgttcc

SEQ ID NO: 92 - protein, 622 aa, Homo sapiens [sequence omitted]

SEQ ID NO: 93 - DNA, 2070 bp, Homo sapiens
  CDS (119)..(1984)
gaacacaaacttgctggcgggaagagcccggaaagaaacctgtggatctcccttcgagatcatccaaagagaagaaaggtgacctcacattcgtgccccttagcagcactctgcagaaatgcctcctcagctgcaaaacggcctgaacctctcggccaaagttgtccagggaagcctggacagcctgccccaggcagtgagggagtttctcgagaataacgctgagctgtgtcagcctgatcacatccacatctgtgacggctctgaggaggagaatgggcggcttctgggccagatggaggaagagggcatcctcaggcggctgaagaagtatgacaactgctggttggctctcactgaccccagggatgtggccaggatcgaaagcaagacggttatcgtcacccaagagcaaagagacacagtgcccatccccaaaacaggcctcagccagctcggtcgctggatgtcagaggaggattttgagaaagcgttcaatgccaggttcccagggtgcatgaaaggtcgcaccatgtacgtcatcccattcagcatggggccgctgggctcacctctgtcgaagatcggcatcgagctgacggattcgccctacgtggtggccagcatgcggatcatgacgcggatgggcacgcccgtcctggaagcactgggcgatggggagtttgtcaaatgcctccattctgtggggtgccctctgcctttacaaaagcctttggtcaacaactggccctgcaacccggagctgacgctcatcgcccacctgcctgaccgcagagagatcatctcctttggcagtgggtacggcgggaactcgctgctcgggaagaagtgctttgctctcaggatggccagccggctggccaaggaggaagggtggctggcagagcacatgctgattctgggtataaccaaccctgagggtgagaagaagtacctggcggccgcatttcccagcgcctgcgggaagaccaacctggccatgatgaaccccagcctccccgggtggaaggttgagtgcgtcggggatgacattgcctggatgaagtttgacgcacaaggtcatttaagggccatcaacccagaaaatggctttttcggtgtcgctcctgggacttcagtgaagaccaaccccaatgccatcaagaccatccagaagaacacaatctttaccaatgtggccgagaccagcgacgggggcgtttactgggaaggtattgatgagccgctagcttcaggtgtcaccatcacgtcctggaagaataaggagtggagctcagaggatggggaaccttgtgcccaccccaactcgaggttctgcacccctgccagccagtgccccatcattgatgctgcctgggagtctccggaaggtgttcccattgaaggcattatctttggaggccgtagacctgctggtgtccctctagtctatgaagctctcagctggcaacatggagtctttgtgggggcggccatgagatcagaggccacagcggctgcagaacataaaggcaaaatcatcatgcatgacccctttgccatgcggcccttctttggctacaacttcggcaaatacctggcccactggcttagcatggcccagcacccagcagccaaactgcccaagatcttccatgtcaactggttccggaaggacaaggaaggcaaattcctctggccaggctttggagagaactccagggtgctggagtggatgttcaaccggatcgatggaaaagccagcaccaagctcacgcccataggctacatccccaaggaggatgccctgaacctgaaaggcctggggcacatcaacatgatggagcttttcagcatctccaaggaattctgggagaaggaggtggaagacatcgagaagtatctggaggatcaagtcaatgccgacctcccctgtgaaatcgagagagagatccttgccttgaagcaaagaataagccagatgtaatcagggcctgagtgctttacctttaaaatcattccctttcccatccataaggtgcagtaggagcaagagagggcaagtgttcc

SEQ ID NO: 94 - protein, 622 aa, Homo sapiens [sequence omitted]

SEQ ID NO: 95 - DNA, 2070 bp, Homo sapiens
gaacacaaacttgctggcgggaagagcccggaaagaaacctgtggatctcccttcgagatcatccaaagagaagaaaggtgacctcacattcgtgccccttagcagcactctgcagaaatgcctcctcagctgcaaaacggcctgaacctctcggccaaagttgtccagggaagcctggacagcctgccccaggcagtgagggagtttctcgagaataacgctgagctgtgtcagcctgatcacatccacatctgtgacggctctgaggaggagaatgggcggcttctgggccagatggaggaagagggcatcctcaggcggctgaagaagtatgacaactgctggttggctctcactgaccccagggatgtggccaggatcgaaagcaagacggttatcgtcacccaagagcaaagagacacagtgcccatccccaaaacaggcctcagccagctcggtcgctggatgtcagaggaggattttgagaaagcgttcaatgccaggttcccagggtgcatgaaaggtcgcaccatgtacgtcatcccattcagcatggggccgctgggctcacctctgtcgaagatcggcatcgagctgacggattcgccctacgtggtggccagcatgcggatcatgacgcggatgggcacgcccgtcctggaagcactgggcgatggggagtttgtcaaatgcctccattctgtggggtgccctctgcctttacaaaagcctttggtcaacaactggccctgcaacccggagctgacgctcatcgcccacctgcctgaccgcagagagatcatctcctttggcagtgggtacggcgggaactcgctgctcgggaagaagtgctttgctctcaggatggccagccggctggccaaggaggaagggtggctggcagagcacatgctgattctgggtataaccaaccctgagggtgagaagaagtacctggcggccgcatttcccagcgcctgcgggaagaccaacctggccatgatgaaccccagcctccccgggtggaaggttgagtgcgtcggggatgacattgcctggatgaagtttgacgcacaaggtcatttaagggccatcaacccagaaaatggctttttcggtgtcgctcctgggacttcagtgaagaccaaccccaatgccatcaagaccatccagaagaacacaatctttaccaatgtggccgagaccagcgacgggggcgtttactgggaaggtattgatgagccgctagcttcaggcgtcaccatcacgtcctggaagaataaggagtggagctcagaggatggggaaccttgtgcccaccccaactcgaggttctgaacccctgccagccagtgccccatcattgatgctgcctgggagtctccggaaggtgttcccattgaaggcattatctttggaggccgtagacctgctggtgtccctctagtctatgaagctctcagctggcaacatggagtctttgtgggggcggccatgagatcagaggccacagcggctgcagaacataaaggcaaaatcatcatgcatgacccctttgccatgcggcccttctttggctacaacttcggcaaatacctggcccactggcttagcatggcccagcacccagcagccaaactgcccaagatcttccatgtcaactggttccggaaggacaaggaaggcaaattcctctggccaggctttggagagaactccagggtgctggagtggatgttcaaccggatcgatggaaaagccagcaccaagctcacgcccataggctacatccccaaggaggatgccctgaacctgaaaggcctggggcacatcaacatgatggagcttttcagcatctccaaggaattctgggagaaggaggtggaagacatcgagaagtatctggaggatcaagtcaatgccgacctcccctgtgaaatcgagagagagatccttgccttgaagcaaagaataagccagatgtaatcagggcctgagtgctttacctttaaaatcattccctttcccatccataaggtgcagtaggagcaagagagggcaagtgttcc

SEQ ID NO: 96 - protein, 621 aa, Homo sapiens
MPPQLQNGLNLSAKVVQGSLDSLPQAVREFLENNAELCQPDHIHICDGSEEENGRLLGQMEEEGILRRLKKYDNCWLALTDPRDVARIESKTVIVTQEQRDTVPIPKTGLSQLGRWMSEEDFEKAFNARFPGCMKGRTMYVIPFSMGPLGSPLSKIGIELTDSPYVVASMRIMTRMGTPVLEALGDGEFVKCLHSVGCPLPLQKPLVNNWPCNPELTLIAHLPDRREIISFGSGYGGNSLLGKKCFALRMASRLAKEEGWLAEHMLILGITNPEGEKKYLAAAFPSACGKTNLAMMNPSLPGWKVECVGDDIAWMKFDAQGHLRAINPENGFFGVAPGTSVKTNPNAIKTIQKNTIFTNVAETSDGGVYWEGIDEPLASGVTITSWKNKEWSSEDGEPCAHPNSRFTPASQCPIIDAAWESPEGVPIEGIIFGGRRPAGVPLVYEALSWQHGVFVGAAMRSEATAAAEHKGKIIMHDPFAMRPFFGYNFGKYLAHWLSMAQHPAAKLPKIFHVNWFRKDKEGKFLWPGFGENSRVLEWMFNRIDGKASTKLTPIGYIPKEDALNLKGLGHINMMELFSISKEFWEKEVEDIEKYLEDQVNADLPCEIEREILALKQRISQM

SEQ ID NO: 97 - DNA, 2070 bp, Homo sapiens
  CDS (119)..(1984)
gaacacaaacttgctggcgggaagagcccggaaagaaacctgtggatctcccttcgagatcatccaaagagaagaaaggtgacctcacattcgtgccccttagcagcactctgcagaaatgcctcctcagctgcaaaacggcctgaacctctcggccaaagttgtccagggaagcctggacagcctgccccaggcagtgagggagtttctcgagaataacgctgagctgtgtcagcctgatcacatccacatctgtgacggctctgaggaggagaatgggcggcttctgggccagatggaggaagagggcatcctcaggcggctgaagaagtatgacaactgctggttggctctcactgaccccagggatgtggccaggatcgaaagcaagacggttatcgtcacccaagagcaaagagacacagtgcccatccccaaaacaggcctcagccagctcggtcgctggatgtcagaggaggattttgagaaagcgttcaatgccaggttcccagggtgcatgaaaggtcgcaccatgtacgtcatcccattcagcatggggccgctgggctcacctctgtcgaagatcggcatcgagctgacggattcgccctacgtggtggccagcatgcggatcatgacgcggatgggcacgcccgtcctggaagcactgggcgatggggagtttgtcaaatgcctccattctgtggggtgccctctgcctttacaaaagcctttggtcaacaactggccctgcaacccggagctgacgctcatcgcccacctgcctgaccgcagagagatcatctcctttggcagtgggtacggcgggaactcgctgctcgggaagaagtgctttgctctcaggatggccagccggctggccaaggaggaagggtggctggcagagcacatgctgattctgggtataaccaaccctgagggtgagaagaagtacctggcggccgcatttcccagcgcctgcgggaagaccaacctggccatgatgaaccccagcctccccgggtggaaggttgagtgcgtcggggatgacattgcctggatgaagtttgacgcacaaggtcatttaagggccatcaacccagaaaatggctttttcggtgtcgctcctgggacttcagtgaagaccaaccccaatgccatcaagaccatccagaagaacacaatctttaccaatgtggccgagaccagcgacgggggcgtttactgggaaggtattgatgagccgctagcttcaggcgtcaccatcacgtcctggaagaataaggagtggagctcagaggatggggaaccttgtgcccaccccaactcgaggttctgcacccctgccagccagtgccccatcattgatgctgcctgggagtctccggaaggtgttcccattgaaggcattatctttggaggccgtagacctgctggtgtccctctagtctatgaagctctcagctggcaacatggagtctttgtgggggcggccatgagatcagaggccacagcggctgcagaacataaaggcaaaatcatcatgcatgacccctttgccatgcggcccttctttggctacaacttcggcaaatacctggcccactggcttagcatggcccagcacccagcagccaaactgcccaagatcttccatgtcaactggttccggaaggacagggaaggcaaattcctctggccaggctttggagagaactccagggtgctggagtggatgttcaaccggatcgatggaaaagccagcaccaagctcacgcccataggctacatccccaaggaggatgccctgaacctgaaaggcctggggcacatcaacatgatggagcttttcagcatctccaaggaattctgggagaaggaggtggaagacatcgagaagtatctggaggatcaagtcaatgccgacctcccctgtgaaatcgagagagagatccttgccttgaagcaaagaataagccagatgtaatcagggcctgagtgctttacctttaaaatcattccctttcccatccataaggtgcagtaggagcaagagagggcaagtgttcc

SEQ ID NO: 98 - protein, 622 aa, Homo sapiens
MPPQLQNGLNLSAKVVQGSLDSLPQAVREFLENNAELCQPDHIHICDGSEEENGRLLGQMEEEGILRRLKKYDNCWLALTDPRDVARIESKTVIVTQEQRDTVPIPKTGLSQLGRWMSEEDFEKAFNARFPGCMKGRTMYVIPFSMGPLGSPLSKIGIELTDSPYVVASMRIMTRMGTPVLEALGDGEFVKCLHSVGCPLPLQKPLVNNWPCNPELTLIAHLPDRREIISFGSGYGGNSLLGKKCFALRMASRLAKEEGWLAEHMLILGITNPEGEKKYLAAAFPSACGKTNLAMMNPSLPGWKVECVGDDIAWMKFDAQGHLRAINPENGFFGVAPGTSVKTNPNAIKTIQKNTIFTNVAETSDGGVYWEGIDEPLASGVTITSWKNKEWSSEDGEPCAHPNSRFCTPASQCPIIDAAWESPEGVPIEGIIFGGRRPAGVPLVYEALSWQHGVFVGAAMRSEATAAAEHKGKIIMHDPFAMRPFFGYNFGKYLAHWLSMAQHPAAKLPKIFHVNWFRKDREGKFLWPGFGENSRVLEWMFNRIDGKASTKLTPIGYIPKEDALNLKGLGHINMMELFSISKEFWEKEVEDIEKYLEDQVNADLPCEIEREILALKQRISQM

SEQ ID NO: 99 - DNA, 2070 bp, Homo sapiens
  CDS (119)..(1984)
gaacacaaacttgctggcgggaagagcccggaaagaaacctgtggatctcccttcgagatcatccaaagagaagaaaggtgacctcacattcgtgccccttagcagcactctgcagaaatgcctcctcagctgcaaaacggcctgaacctctcggccaaagttgtccagggaagcctggacagcctgccccaggcagtgagggagtttctcgagaataacgctgagctgtgtcagcctgatcacatccacatctgtgacggctctgaggaggagaatgggcggcttctgggccagatggaggaagagggcatcctcaggcggctgaagaagtatgacaactgctggttggctctcactgaccccagggatgtggccaggatcgaaagcaagacggttatcgtcacccaagagcaaagagacacagtgcccatccccaaaacaggcctcagccagctcggtcgctggatgtcagaggaggattttgagaaagcgttcaatgccaggttcccagggtgcatgaaaggtcgcaccatgtacgtcatcccattcagcatggggccgctgggctcacctctgtcgaagatcggcatcgagctgacggattcgccctacgtggtggccagcatgcggatcatgacgcggatgggcacgcccgtcctggaagcactgggcgatggggagtttgtcaaatgcctccattctgtggggtgccctctgcctttacaaaagcctttggtcaacaactggccctgcaacccggagctgacgctcatcgcccacctgcctgaccgcagagagatcatctcctttggcagtgggtacggcgggaactcgctgctcgggaagaagtgctttgctctcaggatggccagccggctggccaaggaggaagggtggctggcagagcacatgctgattctgggtataaccaaccctgagggtgagaagaagtacctggcggccgcatttcccagcgcctgcgggaagaccaacctggccatgatgaaccccagcctccccgggtggaaggttgagtgcgtcggggatgacattgcctggatgaagtttgacgcacaaggtcatttaagggccatcaacccagaaaatggctttttcggtgtcgctcctgggacttcagtgaagaccaaccccaatgccatcaagaccatccagaagaacacaatctttaccaatgtggccgagaccagcgacgggggcgtttactgggaaggtattgatgagccgctagcttcaggcgtcaccatcacgtcctggaagaataaggagtggagctcagaggatggggaaccttgtgcccaccccaactcgaggttctgcacccctgccagccagtgccccatcattgatgctgcctgggagtctccggaaggtgttcccattgaaggcattatctttggaggccgtagacctgctggtgtccctctagtctatgaagctctcagctggcaacatggagtctttgtgggggcggccatgagatcagaggccacagcggctgcagaacataaaggcaaaatcatcatgcatgacccctttgccatgcggcccttctttggctacaacttcggcaaatacctggcccactggcttagcatggcccagcacccagcagccaaactgcccaagatcttccatgtcaactggttccggaaggacaaggaaggcaaattcctctggccaggctttggagagaactccagggtgctggggtggatgttcaaccggatcgatggaaaagccagcaccaagctcacgcccataggctacatccccaaggaggatgccctgaacctgaaaggcctggggcacatcaacatgatggagcttttcagcatctccaaggaattctgggagaaggaggtggaagacatcgagaagtatctggaggatcaagtcaatgccgacctcccctgtgaaatcgagagagagatccttgccttgaagcaaagaataagccagatgtaatcagggcctgagtgctttacctttaaaatcattccctttcccatccataaggtgcagtaggagcaagagagggcaagtgttcc

SEQ ID NO: 100 - protein, 622 aa, Homo sapiens
MPPQLQNGLNLSAKVVQGSLDSLPQAVREFLENNAELCQPDHIHICDGSEEENGRLLGQMEEEGILRRLKKYDNCWLALTDPRDVARIESKTVIVTQEQRDTVPIPKTGLSQLGRWMSEEDFEKAFNARFPGCMKGRTMYVIPFSMGPLGSPLSKIGIELTDSPYVVASMRIMTRMGTPVLEALGDGEFVKCLHSVGCPLPLQKPLVNNWPCNPELTLIAHLPDRREIISFGSGYGGNSLLGKKCFALRMASRLAKEEGWLAEHMLILGITNPEGEKKYLAAAFPSACGKTNLAMMNPSLPGWKVECVGDDIAWMKFDAQGHLRAINPENGFFGVAPGTSVKTNPNAIKTIQKNTIFTNVAETSDGGVYWEGIDEPLASGVTITSWKNKEWSSEDGEPCAHPNSRFCTPASQCPIIDAAWESPEGVPIEGIIFGGRRPAGVPLVYEALSWQHGVFVGAAMRSEATAAAEHKGKIIMHDPFAMRPFFGYNFGKYLAHWLSMAQHPAAKLPKIFHVNWFRKDKEGKFLWPGFGENSRVLGWMFNRIDGKASTKLTPIGYIPKEDALNLKGLGHINMMELFSISKEFWEKEVEDIEKYLEDQVNADLPCEIEREILALKQRISQM

SEQ ID NO: 101 - DNA, 2070 bp, Homo sapiens
  CDS (119)..(1984)
gaacacaaacttgctggcgggaagagcccggaaagaaacctgtggatctcccttcgagatcatccaaagagaagaaaggtgacctcacattcgtgccccttagcagcactctgcagaaatgcctcctcagctgcaaaacggcctgaacctctcggccaaagttgtccagggaagcctggacagcctgccccaggcagtgagggagtttctcgagaataacgctgagctgtgtcagcctgatcacatccacatctgtgacggctctgaggaggagaatgggcggcttctgggccagatggaggaagagggcatcctcaggcggctgaagaagtatgacaactgctggttggctctcactgaccccagggatgtggccaggatcgaaagcaagacggttatcgtcacccaagagcaaagagacacagtgcccatccccaaaacaggcctcagccagctcggtcgctggatgtcagaggaggattttgagaaagcgttcaatgccaggttcccagggtgcatgaaaggtcgcaccatgtacgtcatcccattcagcatggggccgctgggctcacctctgtcgaagatcggcatcgagctgacggattcgccctacgtggtggccagcatgcggatcatgacgcggatgggcacgcccgtcctggaagcactgggcgatggggagtttgtcaaatgcctccattctgtggggtgccctctgcctttacaaaagcctttggtcaacaactggccctgcaacccggagctgacgctcatcgcccacctgcctgaccgcagagagatcatctcctttggcagtgggtacggcgggaactcgctgctcgggaagaagtgctttgctctcaggatggccagccggctggccaaggaggaagggtggctggcagagcacatgctgattctgggtataaccaaccctgagggtgagaagaagtacctggcggccgcatttcccagcgcctgcgggaagaccaacctggccatgatgaaccccagcctccccgggtggaaggttgagtgcgtcggggatgacattgcctggatgaagtttgacgcacaaggtcatttaagggccatcaacccagaaaatggctttttcggtgtcgctcctgggacttcagtgaagaccaaccccaatgccatcaagaccatccagaagaacacaatctttaccaatgtggccgagaccagcgacgggggcgtttactgggaaggtattgatgagccgctagcttcaggcgtcaccatcacgtcctggaagaataaggagtggagctcagaggatggggaaccttgtgcccaccccaactcgaggttctgcacccctgccagccagtgccccatcattgatgctgcctgggagtctccggaaggtgttcccattgaaggcattatctttggaggccgtagacctgctggtgtccctctagtctatgaagctctcagctggcaacatggagtctttgtgggggcggccatgagatcagaggccacagcggctgcagaacataaaggcaaaatcatcatgcatgacccctttgccatgcggcccttctttggctacaacttcggcaaatacctggcccactggcttagcatggcccagcacccagcagccaaactgcccaagatcttccatgtcaactggttccggaaggacaaggaaggcaaattcctctggccaggctttggagagaactccagggtgctggagtggatgttcaaccggatcgatggaaaagccagcaccaagcccacgcccataggctacatccccaaggaggatgccctgaacctgaaaggcctggggcacatcaacatgatggagcttttcagcatctccaaggaattctgggagaaggaggtggaagacatcgagaagtatctggaggatcaagtcaatgccgacctcccctgtgaaatcgagagagagatccttgccttgaagcaaagaataagccagatgtaatcagggcctgagtgctttacctttaaaatcattccctttcccatccataaggtgcagtaggagcaagagagggcaagtgttcc

SEQ ID NO: 102 - protein, 622 aa, Homo sapiens
MPPQLQNGLNLSAKVVQGSLDSLPQAVREFLENNAELCQPDHIHICDGSEEENGRLLGQMEEEGILRRLKKYDNCWLALTDPRDVARIESKTVIVTQEQRDTVPIPKTGLSQLGRWMSEEDFEKAFNARFPGCMKGRTMYVIPFSMGPLGSPLSKIGIELTDSPYVVASMRIMTRMGTPVLEALGDGEFVKCLHSVGCPLPLQKPLVNNWPCNPELTLIAHLPDRREIISFGSGYGGNSLLGKKCFALRMASRLAKEEGWLAEHMLILGITNPEGEKKYLAAAFPSACGKTNLAMMNPSLPGWKVECVGDDIAWMKFDAQGHLRAINPENGFFGVAPGTSVKTNPNAIKTIQKNTIFTNVAETSDGGVYWEGIDEPLASGVTITSWKNKEWSSEDGEPCAHPNSRFCTPASQCPIIDAAWESPEGVPIEGIIFGGRRPAGVPLVYEALSWQHGVFVGAAMRSEATAAAEHKGKIIMHDPFAMRPFFGYNFGKYLAHWLSMAQHPAAKLPKIFHVNWFRKDKEGKFLWPGFGENSRVLEWMFNRIDGKASTKPTPIGYIPKEDALNLKGLGHINMMELFSISKEFWEKEVEDIEKYLEDQVNADLPCEIEREILALKQRISQM

SEQ ID NO: 103 - DNA, 2070 bp, Homo sapiens
  CDS (119)..(1984)
gaacacaaacttgctggcgggaagagcccggaaagaaacctgtggatctcccttcgagatcatccaaagagaagaaaggtgacctcacattcgtgccccttagcagcactctgcagaaatgcctcctcagctgcaaaacggcctgaacctctcggccaaagttgtccagggaagcctggacagcctgccccaggcagtgagggagtttctcgagaataacgctgagctgtgtcagcctgatcacatccacatctgtgacggctctgaggaggagaatgggcggcttctgggccagatggaggaagagggcatcctcaggcggctgaagaagtatgacaactgctggttggctctcactgaccccagggatgtggccaggatcgaaagcaagacggttatcgtcacccaagagcaaagagacacagtgcccatccccaaaacaggcctcagccagctcggtcgctggatgtcagaggaggattttgagaaagcgttcaatgccaggttcccagggtgcatgaaaggtcgcaccatgtacgtcatcccattcagcatggggccgctgggctcacctctgtcgaagatcggcatcgagctgacggattcgccctacgtggtggccagcatgcggatcatgacgcggatgggcacgcccgtcctggaagcactgggcgatggggagtttgtcaaatgcctccattctgtggggtgccctctgcctttacaaaagcctttggtcaacaactggccctgcaacccggagctgacgctcatcgcccacctgcctgaccgcagagagatcatctcctttggcagtgggtacggcgggaactcgctgctcgggaagaagtgctttgctctcaggatggccagccggctggccaaggaggaagggtggctggcagagcacatgctgattctgggtataaccaaccctgagggtgagaagaagtacctggcggccgcatttcccagcgcctgcgggaagaccaacctggccatgatgaaccccagcctccccgggtggaaggttgagtgcgtcggggatgacattgcctggatgaagtttgacgcacaaggtcatttaagggccatcaacccagaaaatggctttttcggtgtcgctcctgggacttcagtgaagaccaaccccaatgccatcaagaccatccagaagaacacaatctttaccaatgtggccgagaccagcgacgggggcgtttactgggaaggtattgatgagccgctagcttcaggcgtcaccatcacgtcctggaagaataaggagtggagctcagaggatggggaaccttgtgcccaccccaactcgaggttctgcacccctgccagccagtgccccatcattgatgctgcctgggagtctccggaaggtgttcccattgaaggcattatctttggaggccgtagacctgctggtgtccctctagtctatgaagctctcagctggcaacatggagtctttgtgggggcggccatgagatcagaggccacagcggctgcagaacataaaggcaaaatcatcatgcatgacccctttgccatgcggcccttctttggctacaacttcggcaaatacctggcccactggcttagcatggcccagcacccagcagccaaactgcccaagatcttccatgtcaactggttccggaaggacaaggaaggcaaattcctctggccaggctttggagagaactccagggtgctggagtggatgttcaaccggatcgatggaaaagccagcaccaagctcacgcccataggctacatccccaaggaggatgccctgaacctgaaaggcctggggcacatcaacatgatggagcctttcagcatctccaaggaattctgggagaaggaggtggaagacatcgagaagtatctggaggatcaagtcaatgccgacctcccctgtgaaatcgagagagagatccttgccttgaagcaaagaataagccagatgtaatcagggcctgagtgctttacctttaaaatcattccctttcccatccataaggtgcagtaggagcaagagagggcaagtgttcc

SEQ ID NO: 104 - protein, 622 aa, Homo sapiens
MPPQLQNGLNLSAKVVQGSLDSLPQAVREFLENNAELCQPDHIHICDGSEEENGRLLGQMEEEGILRRLKKYDNCWLALTDPRDVARIESKTVIVTQEQRDTVPIPKTGLSQLGRWMSEEDFEKAFNARFPGCMKGRTMYVIPFSMGPLGSPLSKIGIELTDSPYVVASMRIMTRMGTPVLEALGDGEFVKCLHSVGCPLPLQKPLVNNWPCNPELTLIAHLPDRREIISFGSGYGGNSLLGKKCFALRMASRLAKEEGWLAEHMLILGITNPEGEKKYLAAAFPSACGKTNLAMMNPSLPGWKVECVGDDIAWMKFDAQGHLRAINPENGFFGVAPGTSVKTNPNAIKTIQKNTIFTNVAETSDGGVYWEGIDEPLASGVTITSWKNKEWSSEDGEPCAHPNSRFCTPASQCPIIDAAWESPEGVPIEGIIFGGRRPAGVPLVYEALSWQHGVFVGAAMRSEATAAAEHKGKIIMHDPFAMRPFFGYNFGKYLAHWLSMAQHPAAKLPKIFHVNWFRKDKEGKFLWPGFGENSRVLEWMFNRIDGKASTKLTPIGYIPKEDALNLKGLGHINMMEPFSISKEFWEKEVEDIEKYLEDQVNADLPCEIEREILALKQRISQM

SEQ ID NO: 105 - DNA, 2070 bp, Homo sapiens
  CDS (119)..(1984)
gaacacaaacttgctggcgggaagagcccggaaagaaacctgtggatctcccttcgagatcatccaaagagaagaaaggtgacctcacattcgtgccccttagcagcactctgcagaaatgcctcctcagctgcaaaacggcctgaacctctcggccaaagttgtccagggaagcctggacagcctgccccaggcagtgagggagtttctcgagaataacgctgagctgtgtcagcctgatcacatccacatctgtgacggctctgaggaggagaatgggcggcttctgggccagatggaggaagagggcatcctcaggcggctgaagaagtatgacaactgctggttggctctcactgaccccagggatgtggccaggatcgaaagcaagacggttatcgtcacccaagagcaaagagacacagtgcccatccccaaaacaggcctcagccagctcggtcgctggatgtcagaggaggattttgagaaagcgttcaatgccaggttcccagggtgcatgaaaggtcgcaccatgtacgtcatcccattcagcatggggccgctgggctcacctctgtcgaagatcggcatcgagctgacggattcgccctacgtggtggccagcatgcggatcatgacgcggatgggcacgcccgtcctggaagcactgggcgatggggagtttgtcaaatgcctccattctgtggggtgccctctgcctttacaaaagcctttggtcaacaactggccctgcaacccggagctgacgctcatcgcccacctgcctgaccgcagagagatcatctcctttggcagtgggtacggcgggaactcgctgctcgggaagaagtgctttgctctcaggatggccagccggctggccaaggaggaagggtggctggcagagcacatgctgattctgggtataaccaaccctgagggtgagaagaagtacctggcggccgcatttcccagcgcctgcgggaagaccaacctggccatgatgaaccccagcctccccgggtggaaggttgagtgcgtcggggatgacattgcctggatgaagtttgacgcacaaggtcatttaagggccatcaacccagaaaatggctttttcggtgtcgctcctgggacttcagtgaagaccaaccccaatgccatcaagaccatccagaagaacacaatctttaccaatgtggccgagaccagcgacgggggcgtttactgggaaggtattgatgagccgctagcttcaggcgtcaccatcacgtcctggaagaataaggagtggagctcagaggatggggaaccttgtgcccaccccaactcgaggttctgcacccctgccagccagtgccccatcattgatgctgcctgggagtctccggaaggtgttcccattgaaggcattatctttggaggccgtagacctgctggtgtccctctagtctatgaagctctcagctggcaacatggagtctttgtgggggcggccatgagatcagaggccacagcggctgcagaacataaaggcaaaatcatcatgcatgacccctttgccatgcggcccttctttggctacaacttcggcaaatacctggcccactggcttagcatggcccagcacccagcagccaaactgcccaagatcttccatgtcaactggttccggaaggacaaggaaggcaaattcctctggccaggctttggagagaactccagggtgctggagtggatgttcaaccggatcgatggaaaagccagcaccaagctcacgcccataggctacatccccaaggaggatgccctgaacctgaaaggcctggggcacatcaacatgatggagcttttcagcacctccaaggaattctgggagaaggaggtggaagacatcgagaagtatctggaggatcaagtcaatgccgacctcccctgtgaaatcgagagagagatccttgccttgaagcaaagaataagccagatgtaatcagggcctgagtgctttacctttaaaatcattccctttcccatccataaggtgcagtaggagcaagagagggcaagtgttcc

SEQ ID NO: 106 - protein, 622 aa, Homo sapiens
MPPQLQNGLNLSAKVVQGSLDSLPQAVREFLENNAELCQPDHIHICDGSEEENGRLLGQMEEEGILRRLKKYDNCWLALTDPRDVARIESKTVIVTQEQRDTVPIPKTGLSQLGRWMSEEDFEKAFNARFPGCMKGRTMYVIPFSMGPLGSPLSKIGIELTDSPYVVASMRIMTRMGTPVLEALGDGEFVKCLHSVGCPLPLQKPLVNNWPCNPELTLIAHLPDRREIISFGSGYGGNSLLGKKCFALRMASRLAKEEGWLAEHMLILGITNPEGEKKYLAAAFPSACGKTNLAMMNPSLPGWKVECVGDDIAWMKFDAQGHLRAINPENGFFGVAPGTSVKTNPNAIKTIQKNTIFTNVAETSDGGVYWEGIDEPLASGVTITSWKNKEWSSEDGEPCAHPNSRFCTPASQCPIIDAAWESPEGVPIEGIIFGGRRPAGVPLVYEALSWQHGVFVGAAMRSEATAAAEHKGKIIMHDPFAMRPFFGYNFGKYLAHWLSMAQHPAAKLPKIFHVNWFRKDKEGKFLWPGFGENSRVLEWMFNRIDGKASTKLTPIGYIPKEDALNLKGLGHINMMELFSTSKEFWEKEVEDIEKYLEDQVNADLPCEIEREILALKQRISQM

SEQ ID NO: 107 - DNA, 2070 bp, Homo sapiens
  CDS (119)..(1984)
gaacacaaacttgctggcgggaagagcccggaaagaaacctgtggatctcccttcgagatcatccaaagagaagaaaggtgacctcacattcgtgccccttagcagcactctgcagaaatgcctcctcagctgcaaaacggcctgaacctctcggccaaagttgtccagggaagcctggacagcctgccccaggcagtgagggagtttctcgagaataacgctgagctgtgtcagcctgatcacatccacatctgtgacggctctgaggaggagaatgggcggcttctgggccagatggaggaagagggcatcctcaggcggctgaagaagtatgacaactgctggttggctctcactgaccccagggatgtggccaggatcgaaagcaagacggttatcgtcacccaagagcaaagagacacagtgcccatccccaaaacaggcctcagccagctcggtcgctggatgtcagaggaggattttgagaaagcgttcaatgccaggttcccagggtgcatgaaaggtcgcaccatgtacgtcatcccattcagcatggggccgctgggctcacctctgtcgaagatcggcatcgagctgacggattcgccctacgtggtggccagcatgcggatcatgacgcggatgggcacgcccgtcctggaagcactgggcgatggggagtttgtcaaatgcctccattctgtggggtgccctctgcctttacaaaagcctttggtcaacaactggccctgcaacccggagctgacgctcatcgcccacctgcctgaccgcagagagatcatctcctttggcagtgggtacggcgggaactcgctgctcgggaagaagtgctttgctctcaggatggccagccggctggccaaggaggaagggtggctggcagagcacatgctgattctgggtataaccaaccctgagggtgagaagaagtacctggcggccgcatttcccagcgcctgcgggaagaccaacctggccatgatgaaccccagcctccccgggtggaaggttgagtgcgtcggggatgacattgcctggatgaagtttgacgcacaaggtcatttaagggccatcaacccagaaaatggctttttcggtgtcgctcctgggacttcagtgaagaccaaccccaatgccatcaagaccatccagaagaacacaatctttaccaatgtggccgagaccagcgacgggggcgtttactgggaaggtattgatgagccgctagcttcaggcgtcaccatcacgtcctggaagaataaggagtggagctcagaggatggggaaccttgtgcccaccccaactcgaggttctgcacccctgccagccagtgccccatcattgatgctgcctgggagtctccggaaggtgttcccattgaaggcattatctttggaggccgtagacctgctggtgtccctctagtctatgaagctctcagctggcaacatggagtctttgtgggggcggccatgagatcagaggccacagcggctgcagaacataaaggcaaaatcatcatgcatgacccctttgccatgcggcccttctttggctacaacttcggcaaatacctggcccactggcttagcatggcccagcacccagcagccaaactgcccaagatcttccatgtcaactggttccggaaggacaaggaaggcaaattcctctggccaggctttggagagaactccagggtgctggagtggatgttcaaccggatcgatggaaaagccagcaccaagctcacgcccataggctacatccccaaggaggatgccctgaacctgaaaggcctggggcacatcaacatgatggagcttttcagcatctccaaggaattctgggagaaggaggtgggagacatcgagaagtatctggaggatcaagtcaatgccgacctcccctgtgaaatcgagagagagatccttgccttgaagcaaagaataagccagatgtaatcagggcctgagtgctttacctttaaaatcattccctttcccatccataaggtgcagtaggagcaagagagggcaagtgttcc

SEQ ID NO: 108 - protein, 622 aa, Homo sapiens
MPPQLQNGLNLSAKVVQGSLDSLPQAVREFLENNAELCQPDHIHICDGSEEENGRLLGQMEEEGILRRLKKYDNCWLALTDPRDVARIESKTVIVTQEQRDTVPIPKTGLSQLGRWMSEEDFEKAFNARFPGCMKGRTMYVIPFSMGPLGSPLSKIGIELTDSPYVVASMRIMTRMGTPVLEALGDGEFVKCLHSVGCPLPLQKPLVNNWPCNPELTLIAHLPDRREIISFGSGYGGNSLLGKKCFALRMASRLAKEEGWLAEHMLILGITNPEGEKKYLAAAFPSACGKTNLAMMNPSLPGWKVECVGDDIAWMKFDAQGHLRAINPENGFFGVAPGTSVKTNPNAIKTIQKNTIFTNVAETSDGGVYWEGIDEPLASGVTITSWKNKEWSSEDGEPCAHPNSRFCTPASQCPIIDAAWESPEGVPIEGIIFGGRRPAGVPLVYEALSWQHGVFVGAAMRSEATAAAEHKGKIIMHDPFAMRPFFGYNFGKYLAHWLSMAQHPAAKLPKIFHVNWFRKDKEGKFLWPGFGENSRVLEWMFNRIDGKASTKLTPIGYIPKEDALNLKGLGHINMMELFSISKEFWEKEVGDIEKYLEDQVNADLPCEIEREILALKQRISQM

SEQ ID NO: 109 - DNA, 2070 bp, Homo sapiens
  CDS (119)..(1984)
gaacacaaacttgctggcgggaagagcccggaaagaaacctgtggatctcccttcgagatcatccaaagagaagaaaggtgacctcacattcgtgccccttagcagcactctgcagaaatgcctcctcagctgcaaaacggcctgaacctctcggccaaagttgtccagggaagcctggacagcctgccccaggcagtgagggagtttctcgagaataacgctgagctgtgtcagcctgatcacatccacatctgtgacggctctgaggaggagaatgggcggcttctgggccagatggaggaagagggcatcctcaggcggctgaagaagtatgacaactgctggttggctctcactgaccccagggatgtggccaggatcgaaagcaagacggttatcgtcacccaagagcaaagagacacagtgcccatccccaaaacaggcctcagccagctcggtcgctggatgtcagaggaggattttgagaaagcgttcaatgccaggttcccagggtgcatgaaaggtcgcaccatgtacgtcatcccattcagcatggggccgctgggctcacctctgtcgaagatcggcatcgagctgacggattcgccctacgtggtggccagcatgcggatcatgacgcggatgggcacgcccgtcctggaagcactgggcgatggggagtttgtcaaatgcctccattctgtggggtgccctctgcctttacaaaagcctttggtcaacaactggccctgcaacccggagctgacgctcatcgcccacctgcctgaccgcagagagatcatctcctttggcagtgggtacggcgggaactcgctgctcgggaagaagtgctttgctctcaggatggccagccggctggccaaggaggaagggtggctggcagagcacatgctgattctgggtataaccaaccctgagggtgagaagaagtacctggcggccgcatttcccagcgcctgcgggaagaccaacctggccatgatgaaccccagcctccccgggtggaaggttgagtgcgtcggggatgacattgcctggatgaagtttgacgcacaaggtcatttaagggccatcaacccagaaaatggctttttcggtgtcgctcctgggacttcagtgaagaccaaccccaatgccatcaagaccatccagaagaacacaatctttaccaatgtggccgagaccagcgacgggggcgtttactgggaaggtattgatgagccgctagcttcaggcgtcaccatcacgtcctggaagaataaggagtggagctcagaggatggggaaccttgtgcccaccccaactcgaggttctgcacccctgccagccagtgccccatcattgatgctgcctgggagtctccggaaggtgttcccattgaaggcattatctttggaggccgtagacctgctggtgtccctctagtctatgaagctctcagctggcaacatggagtctttgtgggggcggccatgagatcagaggccacagcggctgcagaacataaaggcaaaatcatcatgcatgacccctttgccatgcggcccttctttggctacaacttcggcaaatacctggcccactggcttagcatggcccagcacccagcagccaaactgcccaagatcttccatgtcaactggttccggaaggacaaggaaggcaaattcctctggccaggctttggagagaactccagggtgctggagtggatgttcaaccggatcgatggaaaagccagcaccaagctcacgcccataggctacatccccaaggaggatgccctgaacctgaaaggcctggggcacatcaacatgatggagcttttcagcatctccaaggaattctgggagaaggaggtggaagacatcgagaagtatctggaggatcaagtcaatgccgaccccccctgtgaaatcgagagagagatccttgccttgaagcaaagaataagccagatgtaatcagggcctgagtgctttacctttaaaatcattccctttcccatccataaggtgcagtaggagcaagagagggcaagtgttcc

SEQ ID NO: 110 - protein, 622 aa, Homo sapiens
MPPQLQNGLNLSAKVVQGSLDSLPQAVREFLENNAELCQPDHIHICDGSEEENGRLLGQMEEEGILRRLKKYDNCWLALTDPRDVARIESKTVIVTQEQRDTVPIPKTGLSQLGRWMSEEDFEKAFNARFPGCMKGRTMYVIPFSMGPLGSPLSKIGIELTDSPYVVASMRIMTRMGTPVLEALGDGEFVKCLHSVGCPLPLQKPLVNNWPCNPELTLIAHLPDRREIISFGSGYGGNSLLGKKCFALRMASRLAKEEGWLAEHMLILGITNPEGEKKYLAAAFPSACGKTNLAMMNPSLPGWKVECVGDDIAWMKFDAQGHLRAINPENGFFGVAPGTSVKTNPNAIKTIQKNTIFTNVAETSDGGVYWEGIDEPLASGVTITSWKNKEWSSEDGEPCAHPNSRFCTPASQCPIIDAAWESPEGVPIEGIIFGGRRPAGVPLVYEALSWQHGVFVGAAMRSEATAAAEHKGKIIMHDPFAMRPFFGYNFGKYLAHWLSMAQHPAAKLPKIFHVNWFRKDKEGKFLWPGFGENSRVLEWMFNRIDGKASTKLTPIGYIPKEDALNLKGLGHINMMELFSISKEFWEKEVEDIEKYLEDQVNADPPCEIEREILALKQRISQM

SEQ ID NO: 111 - DNA, 2078 bp, Homo sapiens
  CDS (80)..(1948)
ggcacgagggcctgtcgccgcgggagcagccgctatctctgtgtgtccgcgtgtgcgcccggtccccgcctgccgcaccatggagagctaccacaagcctgaccagcagaagctgcaggccttgaaggacacgaccaaccgcctacgtatcagctccatccaggccaccactgcggcgggctctggccaccccacgtcatgctgcagcgccgcagagatcatggctgtcctctttttccacaccatgcgctacaagtcccaggacccccggaatccgcacaatgaccgctttgtgctctccaagggccatgcagctcccatcctctacgcggtctgggctgaagctggtttcctggccgaggcggagctgctgaacctgaggaagatcagctccgacttggacgggcacccggtcccgaaacaagctttcaccgacgtggccactggctccctgggccagggcctcggggccgcttgtgggatggcctacaccggcaaatacttcgacaaggccagctaccgagtctattgcttgctgggagatggggagctgtcagagggctctgtatgggaggccatggccttcgccagcatctataagctggacaaccttgtggccattctagacatcaatcgcctgggccagagtgacccggccccgctgcagcaccagatggacatctaccagaagcggtgcgaggccttcggttggcatgccatcatcgtggatggacacagcgtggaggagctgtgcaaggcctttggccaggccaagcaccagccaacagccatcattgccaagaccttcaagggccgagggatcacgggggtagaagataaggagtcttggcatgggaagcccctccccaaaaacatggctgagcagatcatccaggagatctacagccagatccagagcaaaaagaagatcctggcaacccctccacaggaggacgcaccctcagtggacattgccaacatccgcatgcccagcctgcccagctacaaagttggggacaagatagccacccgcaaggcctacgggcaggcactggccaagctgggccatgccagtgaccgcatcatcgccctggatggggacaccaaaaattccaccttctcggagatcttcaaaaaggagcacccggaccgcttcatcgagtgctacattgccgagcagaacatggtgagcatcgcggtgggctgtgccacccgcaacaggacggtgcccttctgcagcacttttgcagccttcttcacgcgggcctttgaccagattcgcatggccgccatctccgagagcaacatcaacctctgcggctcccactgcggcgtttccatcggggaagacgggccctcccagatggccctagaagatctggctatgtttcggtcagtccccacatcaactgtcttttacccaagtgatggcgttgctacagagaaggcagtggaactagccgccaatacaaagggtatctgcttcatccggaccagccgcccagaaaatgccatcatctataacaacaatgaggacttccaggtcggacaagccaaggtggtcctgaagagcaaggatgaccaggtgaccgttatcggggctggggtgaccctgcacgaggccttggccgctgccgaactgctgaagaaagaaaagatcaacatccgcgtgctggaccccttcaccatcaagcccctggacagaaaactcattctcgacagcgctcgtgccaccaagggcaggatcctcaccgtggaggaccattattatgaaggtggcattggtgaggctgtgtccagtgcagtagtgggcgagcctggcatcactgtcacccacctggcagttaaccgggtaccaagaagtgggaagccagctgagctgctgaagatgtttggtatcgacagggatgccattgcacaagctgtgaggggcctcatcaccaaggcctagggcgggtatgaagtgtggggcgggggtctatacattcctgagattctgggaaaggtgctcaaagatgtactgagaggaggggtaaatatatgttttgagaaaaatgaaaaaaaaaaaaaaaaaaaaa

SEQ ID NO: 112 - protein, 623 aa, Homo sapiens
MESYHKPDQQKLQALKDTTNRLRISSIQATTAAGSGHPTSCCSAAEIMAVLFFHTMRYKSQDPRNPHNDRFVLSKGHAAPILYAVWAEAGFLAEAELLNLRKISSDLDGHPVPKQAFTDVATGSLGQGLGAACGMAYTGKYFDKASYRVYCLLGDGELSEGSVWEAMAFASIYKLDNLVAILDINRLGQSDPAPLQHQMDIYQKRCEAFGWHAIIVDGHSVEELCKAFGQAKHQPTAIIAKTFKGRGITGVEDKESWHGKPLPKNMAEQIIQEIYSQIQSKKKILATPPQEDAPSVDIANIRMPSLPSYKVGDKIATRKAYGQALAKLGHASDRIIALDGDTKNSTFSEIFKKEHPDRFIECYIAEQNMVSIAVGCATRNRTVPFCSTFAAFFTRAFDQIRMAAISESNINLCGSHCGVSIGEDGPSQMALEDLAMFRSVPTSTVFYPSDGVATEKAVELAANTKGICFIRTSRPENAIIYNNNEDFQVGQAKVVLKSKDDQVTVIGAGVTLHEALAAAELLKKEKINIRVLDPFTIKPLDRKLILDSARATKGRILTVEDHYYEGGIGEAVSSAVVGEPGITVTHLAVNRVPRSGKPAELLKMFGIDRDAIAQAVRGLITKA

SEQ ID NO: 113 - DNA, 2078 bp, Homo sapiens
  CDS (80)..(1948)
ggcacgagggcctgtcgccgcgggagcagccgctatctctgtgtgtccgcgtgtgcgcccggtccccgcctgccgcaccatggagagctaccacaagcctgaccagcagaagctgcaggccttgaaggacacggccaaccgcctacgtatcagctccatccaggccaccactgcggcgggctctggccaccccacgtcatgctgcagcgccgcagagatcatggctgtcctctttttccacaccatgcgctacaagtcccaggacccccggaatccgcacaatgactgctttgtgctctccaagggccatgcagctcccatcctctacgcggtctgggctgaagctggtttcctggccgaggcggagctgctgaacctgaggaagatcagctccgacttggacgggcacccggtcccgaaacaagctttcaccgacgtggccactggctccctgggccagggcctcggggccgcttgtgggatggcctacaccggcaaatacttcgacaaggccagctaccgagtctattgcttgctgggagatggggagctgtcagagggctctgtatgggaggccatggccttcgccagcatctataagctggacaaccttgtggccattctagacatcaatcgcctgggccagagtgacccggccccgctgcagcaccagatggacatctaccagaagcggtgcgaggccttcggttggcatgccatcatcgtggatggacacagcgtggaggagctgtgcaaggcctttggccaggccaagcaccagccaacagccatcattgccaagaccttcaagggccgagggatcacgggggtagaagataaggagtcttggcatgggaagcccctccccaaaaacatggctgagcagatcatccaggagatctacagccagatccagagcaaaaagaagatcctggcaacccctccacaggaggacgcaccctcagtggacattgccaacatccgcatgcccagcctgcccagctacaaagttggggacaagatagccacccgcaaggcctacgggcaggcactggccaagctgggccatgccagtgaccgcatcatcgccctggatggggacaccaaaaattccaccttctcggagatcttcaaaaaggagcacccggaccgcttcatcgagtgctacattgccgagcagaacatggtgagcatcgcggtgggctgtgccacccgcaacaggacggtgcccttctgcagcacttttgcagccttcttcacgcgggcctttgaccagattcgcatggccgccatctccgagagcaacatcaacctctgcggctcccactgcggcgtttccatcggggaagacgggccctcccagatggccctagaagatctggctatgtttcggtcagtccccacatcaactgtcttttacccaagtgatggcgttgctacagagaaggcagtggaactagccgccaatacaaagggtatctgcttcatccggaccagccgcccagaaaatgccatcatctataacaacaatgaggacttccaggtcggacaagccaaggtggtcctgaagagcaaggatgaccaggtgaccgttatcggggctggggtgaccctgcacgaggccttggccgctgccgaactgctgaagaaagaaaagatcaacatccgcgtgctggaccccttcaccatcaagcccctggacagaaaactcattctcgacagcgctcgtgccaccaagggcaggatcctcaccgtggaggaccattattatgaaggtggcattggtgaggctgtgtccagtgcagtagtgggcgagcctggcatcactgtcacccacctggcagttaaccgggtaccaagaagtgggaagccagctgagctgctgaagatgtttggtatcgacagggatgccattgcacaagctgtgaggggcctcatcaccaaggcctagggcgggtatgaagtgtggggcgggggtctatacattcctgagattctgggaaaggtgctcaaagatgtactgagaggaggggtaaatatatgttttgagaaaaatgaaaaaaaaaaaaaaaaaaaaa

SEQ ID NO: 114 - protein, 623 aa, Homo sapiens
MESYHKPDQQKLQALKDTANRLRISSIQATTAAGSGHPTSCCSAAEIMAVLFFHTMRYKSQDPRNPHNDCFVLSKGHAAPILYAVWAEAGFLAEAELLNLRKISSDLDGHPVPKQAFTDVATGSLGQGLGAACGMAYTGKYFDKASYRVYCLLGDGELSEGSVWEAMAFASIYKLDNLVAILDINRLGQSDPAPLQHQMDIYQKRCEAFGWHAIIVDGHSVEELCKAFGQAKHQPTAIIAKTFKGRGITGVEDKESWHGKPLPKNMAEQIIQEIYSQIQSKKKILATPPQEDAPSVDIANIRMPSLPSYKVGDKIATRKAYGQALAKLGHASDRIIALDGDTKNSTFSEIFKKEHPDRFIECYIAEQNMVSIAVGCATRNRTVPFCSTFAAFFTRAFDQIRMAAISESNINLCGSHCGVSIGEDGPSQMALEDLAMFRSVPTSTVFYPSDGVATEKAVELAANTKGICFIRTSRPENAIIYNNNEDFQVGQAKVVLKSKDDQVTVIGAGVTLHEALAAAELLKKEKINIRVLDPFTIKPLDRKLILDSARATKGRILTVEDHYYEGGIGEAVSSAVVGEPGITVTHLAVNRVPRSGKPAELLKMFGIDRDAIAQAVRGLITKA

SEQ ID NO: 115 - DNA, 2078 bp, Homo sapiens
  CDS (80)..(1948)
ggcacgagggcctgtcgccgcgggagcagccgctatctctgtgtgtccgcgtgtgcgcccggtccccgcctgccgcaccatggagagctaccacaagcctgaccagcagaagctgcaggccttgaaggacacggccaaccgcctacgtatcagctccatccaggccaccactgcggcgggctctggccaccccacgtcatgctgcagcgccgcagagatcatggctgtcctctttttccacaccatgcgctacaagtcccaggacccccggaatccgcacaatgaccgctttgtgctctccaagggccatgcagctcccatcctctacgcggtctgggctgaagctggtttcctggccgaggcggagctgctgaacctgaggaagatcagctccgacttggacgggcacccggtcccgaaacaagctttcaccgacgtggccactggctccctgggccagggcctcggggccgcttgtgggatggcctacaccggcaaatacttcgacaaggccagctaccgagtctattgcttgctgggagatggggagctgtcagagggctctttatgggaggccatggccttcgccagcatctataagctggacaaccttgtggccattctagacatcaatcgcctgggccagagtgacccggccccgctgcagcaccagatggacatctaccagaagcggtgcgaggccttcggttggcatgccatcatcgtggatggacacagcgtggaggagctgtgcaaggcctttggccaggccaagcaccagccaacagccatcattgccaagaccttcaagggccgagggatcacgggggtagaagataaggagtcttggcatgggaagcccctccccaaaaacatggctgagcagatcatccaggagatctacagccagatccagagcaaaaagaagatcctggcaacccctccacaggaggacgcaccctcagtggacattgccaacatccgcatgcccagcctgcccagctacaaagttggggacaagatagccacccgcaaggcctacgggcaggcactggccaagctgggccatgccagtgaccgcatcatcgccctggatggggacaccaaaaattccaccttctcggagatcttcaaaaaggagcacccggaccgcttcatcgagtgctacattgccgagcagaacatggtgagcatcgcggtgggctgtgccacccgcaacaggacggtgcccttctgcagcacttttgcagccttcttcacgcgggcctttgaccagattcgcatggccgccatctccgagagcaacatcaacctctgcggctcccactgcggcgtttccatcggggaagacgggccctcccagatggccctagaagatctggctatgtttcggtcagtccccacatcaactgtcttttacccaagtgatggcgttgctacagagaaggcagtggaactagccgccaatacaaagggtatctgcttcatccggaccagccgcccagaaaatgccatcatctataacaacaatgaggacttccaggtcggacaagccaaggtggtcctgaagagcaaggatgaccaggtgaccgttatcggggctggggtgaccctgcacgaggccttggccgctgccgaactgctgaagaaagaaaagatcaacatccgcgtgctggaccccttcaccatcaagcccctggacagaaaactcattctcgacagcgctcgtgccaccaagggcaggatcctcaccgtggaggaccattattatgaaggtggcattggtgaggctgtgtccagtgcagtagtgggcgagcctggcatcactgtcacccacctggcagttaaccgggtaccaagaagtgggaagccagctgagctgctgaagatgtttggtatcgacagggatgccattgcacaagctgtgaggggcctcatcaccaaggcctagggcgggtatgaagtgtggggcgggggtctatacattcctgagattctgggaaaggtgctcaaagatgtactgagaggaggggtaaatatatgttttgagaaaaatgaaaaaaaaaaaaaaaaaaaaa

SEQ ID NO: 116 - protein, 623 aa, Homo sapiens
MESYHKPDQQKLQALKDTANRLRISSIQATTAAGSGHPTSCCSAAEIMAVLFFHTMRYKSQDPRNPHNDRFVLSKGHAAPILYAVWAEAGFLAEAELLNLRKISSDLDGHPVPKQAFTDVATGSLGQGLGAACGMAYTGKYFDKASYRVYCLLGDGELSEGSLWEAMAFASIYKLDNLVAILDINRLGQSDPAPLQHQMDIYQKRCEAFGWHAIIVDGHSVEELCKAFGQAKHQPTAIIAKTFKGRGITGVEDKESWHGKPLPKNMAEQIIQEIYSQIQSKKKILATPPQEDAPSVDIANIRMPSLPSYKVGDKIATRKAYGQALAKLGHASDRIIALDGDTKNSTFSEIFKKEHPDRFIECYIAEQNMVSIAVGCATRNRTVPFCSTFAAFFTRAFDQIRMAAISESNINLCGSHCGVSIGEDGPSQMALEDLAMFRSVPTSTVFYPSDGVATEKAVELAANTKGICFIRTSRPENAIIYNNNEDFQVGQAKVVLKSKDDQVTVIGAGVTLHEALAAAELLKKEKINIRVLDPFTIKPLDRKLILDSARATKGRILTVEDHYYEGGIGEAVSSAVVGEPGITVTHLAVNRVPRSGKPAELLKMFGIDRDAIAQAVRGLITKA

SEQ ID NO: 117 - DNA, 2078 bp, Homo sapiens
  CDS (80)..(1948)
ggcacgagggcctgtcgccgcgggagcagccgctatctctgtgtgtccgcgtgtgcgcccggtccccgcctgccgcaccatggagagctaccacaagcctgaccagcagaagctgcaggccttgaaggacacggccaaccgcctacgtatcagctccatccaggccaccactgcggcgggctctggccaccccacgtcatgctgcagcgccgcagagatcatggctgtcctctttttccacaccatgcgctacaagtcccaggacccccggaatccgcacaatgaccgctttgtgctctccaagggccatgcagctcccatcctctacgcggtctgggctgaagctggtttcctggccgaggcggagctgctgaacctgaggaagatcagctccgacttggacgggcacccggtcccgaaacaagctttcaccgacgtggccactggctccctgggccagggcctcggggccgcttgtgggatggcctacaccggcaaatacttcgacaaggccagctaccgagtctattgcttgctgggagatggggagctgtcagagggctctgtatgggaggccatggccttcgccagcatctataagctggacaaccttgtggccattctagacatcaatcgcctgggccagagtggcccggccccgctgcagcaccagatggacatctaccagaagcggtgcgaggccttcggttggcatgccatcatcgtggatggacacagcgtggaggagctgtgcaaggcctttggccaggccaagcaccagccaacagccatcattgccaagaccttcaagggccgagggatcacgggggtagaagataaggagtcttggcatgggaagcccctccccaaaaacatggctgagcagatcatccaggagatctacagccagatccagagcaaaaagaagatcctggcaacccctccacaggaggacgcaccctcagtggacattgccaacatccgcatgcccagcctgcccagctacaaagttggggacaagatagccacccgcaaggcctacgggcaggcactggccaagctgggccatgccagtgaccgcatcatcgccctggatggggacaccaaaaattccaccttctcggagatcttcaaaaaggagcacccggaccgcttcatcgagtgctacattgccgagcagaacatggtgagcatcgcggtgggctgtgccacccgcaacaggacggtgcccttctgcagcacttttgcagccttcttcacgcgggcctttgaccagattcgcatggccgccatctccgagagcaacatcaacctctgcggctcccactgcggcgtttccatcggggaagacgggccctcccagatggccctagaagatctggctatgtttcggtcagtccccacatcaactgtcttttacccaagtgatggcgttgctacagagaaggcagtggaactagccgccaatacaaagggtatctgcttcatccggaccagccgcccagaaaatgccatcatctataacaacaatgaggacttccaggtcggacaagccaaggtggtcctgaagagcaaggatgaccaggtgaccgttatcggggctggggtgaccctgcacgaggccttggccgctgccgaactgctgaagaaagaaaagatcaacatccgcgtgctggaccccttcaccatcaagcccctggacagaaaactcattctcgacagcgctcgtgccaccaagggcaggatcctcaccgtggaggaccattattatgaaggtggcattggtgaggctgtgtccagtgcagtagtgggcgagcctggcatcactgtcacccacctggcagttaaccgggtaccaagaagtgggaagccagctgagctgctgaagatgtttggtatcgacagggatgccattgcacaagctgtgaggggcctcatcaccaaggcctagggcgggtatgaagtgtggggcgggggtctatacattcctgagattctgggaaaggtgctcaaagatgtactgagaggaggggtaaatatatgttttgagaaaaatgaaaaaaaaaaaaaaaaaaaaa

SEQ ID NO: 118 - protein, 623 aa, Homo sapiens
MESYHKPDQQKLQALKDTANRLRISSIQATTAAGSGHPTSCCSAAEIMAVLFFHTMRYKSQDPRNPHNDRFVLSKGHAAPILYAVWAEAGFLAEAELLNLRKISSDLDGHPVPKQAFTDVATGSLGQGLGAACGMAYTGKYFDKASYRVYCLLGDGELSEGSVWEAMAFASIYKLDNLVAILDINRLGQSGPAPLQHQMDIYQKRCEAFGWHAIIVDGHSVEELCKAFGQAKHQPTAIIAKTFKGRGITGVEDKESWHGKPLPKNMAEQIIQEIYSQIQSKKKILATPPQEDAPSVDIANIRMPSLPSYKVGDKIATRKAYGQALAKLGHASDRIIALDGDTKNSTFSEIFKKEHPDRFIECYIAEQNMVSIAVGCATRNRTVPFCSTFAAFFTRAFDQIRMAAISESNINLCGSHCGVSIGEDGPSQMALEDLAMFRSVPTSTVFYPSDGVATEKAVELAANTKGICFIRTSRPENAIIYNNNEDFQVGQAKVVLKSKDDQVTVIGAGVTLHEALAAAELLKKEKINIRVLDPFTIKPLDRKLILDSARATKGRILTVEDHYYEGGIGEAVSSAVVGEPGITVTHLAVNRVPRSGKPAELLKMFGIDRDAIAQAVRGLITKA

SEQ ID NO: 119 - DNA, 2078 bp, Homo sapiens
  CDS (80)..(1948)
ggcacgagggcctgtcgccgcgggagcagccgctatctctgtgtgtccgcgtgtgcgcccggtccccgcctgccgcaccatggagagctaccacaagcctgaccagcagaagctgcaggccttgaaggacacggccaaccgcctacgtatcagctccatccaggccaccactgcggcgggctctggccaccccacgtcatgctgcagcgccgcagagatcatggctgtcctctttttccacaccatgcgctacaagtcccaggacccccggaatccgcacaatgaccgctttgtgctctccaagggccatgcagctcccatcctctacgcggtctgggctgaagctggtttcctggccgaggcggagctgctgaacctgaggaagatcagctccgacttggacgggcacccggtcccgaaacaagctttcaccgacgtggccactggctccctgggccagggcctcggggccgcttgtgggatggcctacaccggcaaatacttcgacaaggccagctaccgagtctattgcttgctgggagatggggagctgtcagagggctctgtatgggaggccatggccttcgccagcatctataagctggacaaccttgtggccattctagacatcaatcgcctgggccagagtgacccggccccgctgcagcaccagatggacatctaccagaagcggtgcgtggccttcggttggcatgccatcatcgtggatggacacagcgtggaggagctgtgcaaggcctttggccaggccaagcaccagccaacagccatcattgccaagaccttcaagggccgagggatcacgggggtagaagataaggagtcttggcatgggaagcccctccccaaaaacatggctgagcagatcatccaggagatctacagccagatccagagcaaaaagaagatcctggcaacccctccacaggaggacgcaccctcagtggacattgccaacatccgcatgcccagcctgcccagctacaaagttggggacaagatagccacccgcaaggcctacgggcaggcactggccaagctgggccatgccagtgaccgcatcatcgccctggatggggacaccaaaaattccaccttctcggagatcttcaaaaaggagcacccggaccgcttcatcgagtgctacattgccgagcagaacatggtgagcatcgcggtgggctgtgccacccgcaacaggacggtgcccttctgcagcacttttgcagccttcttcacgcgggcctttgaccagattcgcatggccgccatctccgagagcaacatcaacctctgcggctcccactgcggcgtttccatcggggaagacgggccctcccagatggccctagaagatctggctatgtttcggtcagtccccacatcaactgtcttttacccaagtgatggcgttgctacagagaaggcagtggaactagccgccaatacaaagggtatctgcttcatccggaccagccgcccagaaaatgccatcatctataacaacaatgaggacttccaggtcggacaagccaaggtggtcctgaagagcaaggatgaccaggtgaccgttatcggggctggggtgaccctgcacgaggccttggccgctgccgaactgctgaagaaagaaaagatcaacatccgcgtgctggaccccttcaccatcaagcccctggacagaaaactcattctcgacagcgctcgtgccaccaagggcaggatcctcaccgtggaggaccattattatgaaggtggcattggtgaggctgtgtccagtgcagtagtgggcgagcctggcatcactgtcacccacctggcagttaaccgggtaccaagaagtgggaagccagctgagctgctgaagatgtttggtatcgacagggatgccattgcacaagctgtgaggggcctcatcaccaaggcctagggcgggtatgaagtgtggggcgggggtctatacattcctgagattctgggaaaggtgctcaaagatgtactgagaggaggggtaaatatatgttttgagaaaaatgaaaaaaaaaaaaaaaaaaaaa

SEQ ID NO: 120 - protein, 623 aa, Homo sapiens
MESYHKPDQQKLQALKDTANRLRISSIQATTAAGSGHPTSCCSAAEIMAVLFFHTMRYKSQDPRNPHNDRFVLSKGHAAPILYAVWAEAGFLAEAELLNLRKISSDLDGHPVPKQAFTDVATGSLGQGLGAACGMAYTGKYFDKASYRVYCLLGDGELSEGSVWEAMAFASIYKLDNLVAILDINRLGQSDPAPLQHQMDIYQKRCVAFGWHAIIVDGHSVEELCKAFGQAKHQPTAIIAKTFKGRGITGVEDKESWHGKPLPKNMAEQIIQEIYSQIQSKKKILATPPQEDAPSVDIANIRMPSLPSYKVGDKIATRKAYGQALAKLGHASDRIIALDGDTKNSTFSEIFKKEHPDRFIECYIAEQNMVSIAVGCATRNRTVPFCSTFAAFFTRAFDQIRMAAISESNINLCGSHCGVSIGEDGPSQMALEDLAMFRSVPTSTVFYPSDGVATEKAVELAANTKGICFIRTSRPENAIIYNNNEDFQVGQAKVVLKSKDDQVTVIGAGVTLHEALAAAELLKKEKINIRVLDPFTIKPLDRKLILDSARATKGRILTVEDHYYEGGIGEAVSSAVVGEPGITVTHLAVNRVPRSGKPAELLKMFGIDRDAIAQAVRGLITKA

SEQ ID NO: 121 - DNA, 2078 bp, Homo sapiens
  CDS (80)..(1948)
ggcacgagggcctgtcgccgcgggagcagccgctatctctgtgtgtccgcgtgtgcgcccggtccccgcctgccgcaccatggagagctaccacaagcctgaccagcagaagctgcaggccttgaaggacacggccaaccgcctacgtatcagctccatccaggccaccactgcggcgggctctggccaccccacgtcatgctgcagcgccgcagagatcatggctgtcctctttttccacaccatgcgctacaagtcccaggacccccggaatccgcacaatgaccgctttgtgctctccaagggccatgcagctcccatcctctacgcggtctgggctgaagctggtttcctggccgaggcggagctgctgaacctgaggaagatcagctccgacttggacgggcacccggtcccgaaacaagctttcaccgacgtggccactggctccctgggccagggcctcggggccgcttgtgggatggcctacaccggcaaatacttcgacaaggccagctaccgagtctattgcttgctgggagatggggagctgtcagagggctctgtatgggaggccatggccttcgccagcatctataagctggacaaccttgtggccattctagacatcaatcgcctgggccagagtgacccggccccgctgcagcaccagatggacatctaccagaagcggtgcgaggccttcggttggcatgccatcatcgtggatggacacagcgcggaggagctgtgcaaggcctttggccaggccaagcaccagccaacagccatcattgccaagaccttcaagggccgagggatcacgggggtagaagataaggagtcttggcatgggaagcccctccccaaaaacatggctgagcagatcatccaggagatctacagccagatccagagcaaaaagaagatcctggcaacccctccacaggaggacgcaccctcagtggacattgccaacatccgcatgcccagcctgcccagctacaaagttggggacaagatagccacccgcaaggcctacgggcaggcactggccaagctgggccatgccagtgaccgcatcatcgccctggatggggacaccaaaaattccaccttctcggagatcttcaaaaaggagcacccggaccgcttcatcgagtgctacattgccgagcagaacatggtgagcatcgcggtgggctgtgccacccgcaacaggacggtgcccttctgcagcacttttgcagccttcttcacgcgggcctttgaccagattcgcatggccgccatctccgagagcaacatcaacctctgcggctcccactgcggcgtttccatcggggaagacgggccctcccagatggccctagaagatctggctatgtttcggtcagtccccacatcaactgtcttttacccaagtgatggcgttgctacagagaaggcagtggaactagccgccaatacaaagggtatctgcttcatccggaccagccgcccagaaaatgccatcatctataacaacaatgaggacttccaggtcggacaagccaaggtggtcctgaagagcaaggatgaccaggtgaccgttatcggggctggggtgaccctgcacgaggccttggccgctgccgaactgctgaagaaagaaaagatcaacatccgcgtgctggaccccttcaccatcaagcccctggacagaaaactcattctcgacagcgctcgtgccaccaagggcaggatcctcaccgtggaggaccattattatgaaggtggcattggtgaggctgtgtccagtgcagtagtgggcgagcctggcatcactgtcacccacctggcagttaaccgggtaccaagaagtgggaagccagctgagctgctgaagatgtttggtatcgacagggatgccattgcacaagctgtgaggggcctcatcaccaaggcctagggcgggtatgaagtgtggggcgggggtctatacattcctgagattctgggaaaggtgctcaaagatgtactgagaggaggggtaaatatatgttttgagaaaaatgaaaaaaaaaaaaaaaaaaaaa

SEQ ID NO: 122 - protein, 623 aa, Homo sapiens
MESYHKPDQQKLQALKDTANRLRISSIQATTAAGSGHPTSCCSAAEIMAVLFFHTMRYKSQDPRNPHNDRFVLSKGHAAPILYAVWAEAGFLAEAELLNLRKISSDLDGHPVPKQAFTDVATGSLGQGLGAACGMAYTGKYFDKASYRVYCLLGDGELSEGSVWEAMAFASIYKLDNLVAILDINRLGQSDPAPLQHQMDIYQKRCEAFGWHAIIVDGHSAEELCKAFGQAKHQPTAIIAKTFKGRGITGVEDKESWHGKPLPKNMAEQIIQEIYSQIQSKKKILATPPQEDAPSVDIANIRMPSLPSYKVGDKIATRKAYGQALAKLGHASDRIIALDGDTKNSTFSEIFKKEHPDRFIECYIAEQNMVSIAVGCATRNRTVPFCSTFAAFFTRAFDQIRMAAISESNINLCGSHCGVSIGEDGPSQMALEDLAMFRSVPTSTVFYPSDGVATEKAVELAANTKGICFIRTSRPENAIIYNNNEDFQVGQAKVVLKSKDDQVTVIGAGVTLHEALAAAELLKKEKINIRVLDPFTIKPLDRKLILDSARATKGRILTVEDHYYEGGIGEAVSSAVVGEPGITVTHLAVNRVPRSGKPAELLKMFGIDRDAIAQAVRGLITKA

SEQ ID NO: 123 - DNA, 2078 bp, Homo sapiens
  CDS (80)..(1948)
ggcacgagggcctgtcgccgcgggagcagccgctatctctgtgtgtccgcgtgtgcgcccggtccccgcctgccgcaccatggagagctaccacaagcctgaccagcagaagctgcaggccttgaaggacacggccaaccgcctacgtatcagctccatccaggccaccactgcggcgggctctggccaccccacgtcatgctgcagcgccgcagagatcatggctgtcctctttttccacaccatgcgctacaagtcccaggacccccggaatccgcacaatgaccgctttgtgctctccaagggccatgcagctcccatcctctacgcggtctgggctgaagctggtttcctggccgaggcggagctgctgaacctgaggaagatcagctccgacttggacgggcacccggtcccgaaacaagctttcaccgacgtggccactggctccctgggccagggcctcggggccgcttgtgggatggcctacaccggcaaatacttcgacaaggccagctaccgagtctattgcttgctgggagatggggagctgtcagagggctctgtatgggaggccatggccttcgccagcatctataagctggacaaccttgtggccattctagacatcaatcgcctgggccagagtgacccggccccgctgcagcaccagatggacatctaccagaagcggtgcgaggccttcggttggcatgccatcatcgtggatggacacagcgtggaggggctgtgcaaggcctttggccaggccaagcaccagccaacagccatcattgccaagaccttcaagggccgagggatcacgggggtagaagataaggagtcttggcatgggaagcccctccccaaaaacatggctgagcagatcatccaggagatctacagccagatccagagcaaaaagaagatcctggcaacccctccacaggaggacgcaccctcagtggacattgccaacatccgcatgcccagcctgcccagctacaaagttggggacaagatagccacccgcaaggcctacgggcaggcactggccaagctgggccatgccagtgaccgcatcatcgccctggatggggacaccaaaaattccaccttctcggagatcttcaaaaaggagcacccggaccgcttcatcgagtgctacattgccgagcagaacatggtgagcatcgcggtgggctgtgccacccgcaacaggacggtgcccttctgcagcacttttgcagccttcttcacgcgggcctttgaccagattcgcatggccgccatctccgagagcaacatcaacctctgcggctcccactgcggcgtttccatcggggaagacgggccctcccagatggccctagaagatctggctatgtttcggtcagtccccacatcaactgtcttttacccaagtgatggcgttgctacagagaaggcagtggaactagccgccaatacaaagggtatctgcttcatccggaccagccgcccagaaaatgccatcatctataacaacaatgaggacttccaggtcggacaagccaaggtggtcctgaagagcaaggatgaccaggtgaccgttatcggggctggggtgaccctgcacgaggccttggccgctgccgaactgctgaagaaagaaaagatcaacatccgcgtgctggaccccttcaccatcaagcccctggacagaaaactcattctcgacagcgctcgtgccaccaagggcaggatcctcaccgtggaggaccattattatgaaggtggcattggtgaggctgtgtccagtgcagtagtgggcgagcctggcatcactgtcacccacctggcagttaaccgggtaccaagaagtgggaagccagctgagctgctgaagatgtttggtatcgacagggatgccattgcacaagctgtgaggggcctcatcaccaaggcctagggcgggtatgaagtgtggggcgggggtctatacattcctgagattctgggaaaggtgctcaaagatgtactgagaggaggggtaaatatatgttttgagaaaaatgaaaaaaaaaaaaaaaaaaaaa

SEQ ID NO: 124 - protein, 623 aa, Homo sapiens
MESYHKPDQQKLQALKDTANRLRISSIQATTAAGSGHPTSCCSAAEIMAVLFFHTMRYKSQDPRNPHNDRFVLSKGHAAPILYAVWAEAGFLAEAELLNLRKISSDLDGHPVPKQAFTDVATGSLGQGLGAACGMAYTGKYFDKASYRVYCLLGDGELSEGSVWEAMAFASIYKLDNLVAILDINRLGQSDPAPLQHQMDIYQKRCEAFGWHAIIVDGHSVEGLCKAFGQAKHQPTAIIAKTFKGRGITGVEDKESWHGKPLPKNMAEQIIQEIYSQIQSKKKILATPPQEDAPSVDIANIRMPSLPSYKVGDKIATRKAYGQALAKLGHASDRIIALDGDTKNSTFSEIFKKEHPDRFIECYIAEQNMVSIAVGCATRNRTVPFCSTFAAFFTRAFDQIRMAAISESNINLCGSHCGVSIGEDGPSQMALEDLAMFRSVPTSTVFYPSDGVATEKAVELAANTKGICFIRTSRPENAIIYNNNEDFQVGQAKVVLKSKDDQVTVIGAGVTLHEALAAAELLKKEKINIRVLDPFTIKPLDRKLILDSARATKGRILTVEDHYYEGGIGEAVSSAVVGEPGITVTHLAVNRVPRSGKPAELLKMFGIDRDAIAQAVRGLITKA

SEQ ID NO: 125 - DNA, 2078 bp, Homo sapiens
  CDS (80)..(1948)
ggcacgagggcctgtcgccgcgggagcagccgctatctctgtgtgtccgcgtgtgcgcccggtccccgcctgccgcaccatggagagctaccacaagcctgaccagcagaagctgcaggccttgaaggacacggccaaccgcctacgtatcagctccatccaggccaccactgcggcgggctctggccaccccacgtcatgctgcagcgccgcagagatcatggctgtcctctttttccacaccatgcgctacaagtcccaggacccccggaatccgcacaatgaccgctttgtgctctccaagggccatgcagctcccatcctctacgcggtctgggctgaagctggtttcctggccgaggcggagctgctgaacctgaggaagatcagctccgacttggacgggcacccggtcccgaaacaagctttcaccgacgtggccactggctccctgggccagggcctcggggccgcttgtgggatggcctacaccggcaaatacttcgacaaggccagctaccgagtctattgcttgctgggagatggggagctgtcagagggctctgtatgggaggccatggccttcgccagcatctataagctggacaaccttgtggccattctagacatcaatcgcctgggccagagtgacccggccccgctgcagcaccagatggacatctaccagaagcggtgcgaggccttcggttggcatgccatcatcgtggatggacacagcgtggaggagctgtgcaaggcctttggccaggccaagcaccagccaacagccatcattgccaagaccttcaagggccgagggatcacgggggtagaagataaggagtcttggcatgggaagcccctccccaaaaacatggctgagcagatcatccgggagatctacagccagatccagagcaaaaagaagatcctggcaacccctccacaggaggacgcaccctcagtggacattgccaacatccgcatgcccagcctgcccagctacaaagttggggacaagatagccacccgcaaggcctacgggcaggcactggccaagctgggccatgccagtgaccgcatcatcgccctggatggggacaccaaaaattccaccttctcggagatcttcaaaaaggagcacccggaccgcttcatcgagtgctacattgccgagcagaacatggtgagcatcgcggtgggctgtgccacccgcaacaggacggtgcccttctgcagcacttttgcagccttcttcacgcgggcctttgaccagattcgcatggccgccatctccgagagcaacatcaacctctgcggctcccactgcggcgtttccatcggggaagacgggccctcccagatggccctagaagatctggctatgtttcggtcagtccccacatcaactgtcttttacccaagtgatggcgttgctacagagaaggcagtggaactagccgccaatacaaagggtatctgcttcatccggaccagccgcccagaaaatgccatcatctataacaacaatgaggacttccaggtcggacaagccaaggtggtcctgaagagcaaggatgaccaggtgaccgttatcggggctggggtgaccctgcacgaggccttggccgctgccgaactgctgaagaaagaaaagatcaacatccgcgtgctggaccccttcaccatcaagcccctggacagaaaactcattctcgacagcgctcgtgccaccaagggcaggatcctcaccgtggaggaccattattatgaaggtggcattggtgaggctgtgtccagtgcagtagtgggcgagcctggcatcactgtcacccacctggcagttaaccgggtaccaagaagtgggaagccagctgagctgctgaagatgtttggtatcgacagggatgccattgcacaagctgtgaggggcctcatcaccaaggcctagggcgggtatgaagtgtggggcgggggtctatacattcctgagattctgggaaaggtgctcaaagatgtactgagaggaggggtaaatatatgttttgagaaaaatgaaaaaaaaaaaaaaaaaaaaa

SEQ ID NO: 126 - protein, 623 aa, Homo sapiens
MESYHKPDQQKLQALKDTANRLRISSIQATTAAGSGHPTSCCSAAEIMAVLFFHTMRYKSQDPRNPHNDRFVLSKGHAAPILYAVWAEAGFLAEAELLNLRKISSDLDGHPVPKQAFTDVATGSLGQGLGAACGMAYTGKYFDKASYRVYCLLGDGELSEGSVWEAMAFASIYKLDNLVAILDINRLGQSDPAPLQHQMDIYQKRCEAFGWHAIIVDGHSVEELCKAFGQAKHQPTAIIAKTFKGRGITGVEDKESWHGKPLPKNMAEQIIREIYSQIQSKKKILATPPQEDAPSVDIANIRMPSLPSYKVGDKIATRKAYGQALAKLGHASDRIIALDGDTKNSTFSEIFKKEHPDRFIECYIAEQNMVSIAVGCATRNRTVPFCSTFAAFFTRAFDQIRMAAISESNINLCGSHCGVSIGEDGPSQMALEDLAMFRSVPTSTVFYPSDGVATEKAVELAANTKGICFIRTSRPENAIIYNNNEDFQVGQAKVVLKSKDDQVTVIGAGVTLHEALAAAELLKKEKINIRVLDPFTIKPLDRKLILDSARATKGRILTVEDHYYEGGIGEAVSSAVVGEPGITVTHLAVNRVPRSGKPAELLKMFGIDRDAIAQAVRGLITKA

SEQ ID NO: 127 - DNA, 2078 bp, Homo sapiens
  CDS (80)..(1948)
ggcacgagggcctgtcgccgcgggagcagccgctatctctgtgtgtccgcgtgtgcgcccggtccccgcctgccgcaccatggagagctaccacaagcctgaccagcagaagctgcaggccttgaaggacacggccaaccgcctacgtatcagctccatccaggccaccactgcggcgggctctggccaccccacgtcatgctgcagcgccgcagagatcatggctgtcctctttttccacaccatgcgctacaagtcccaggacccccggaatccgcacaatgaccgctttgtgctctccaagggccatgcagctcccatcctctacgcggtctgggctgaagctggtttcctggccgaggcggagctgctgaacctgaggaagatcagctccgacttggacgggcacccggtcccgaaacaagctttcaccgacgtggccactggctccctgggccagggcctcggggccgcttgtgggatggcctacaccggcaaatacttcgacaaggccagctaccgagtctattgcttgctgggagatggggagctgtcagagggctctgtatgggaggccatggccttcgccagcatctataagctggacaaccttgtggccattctagacatcaatcgcctgggccagagtgacccggccccgctgcagcaccagatggacatctaccagaagcggtgcgaggccttcggttggcatgccatcatcgtggatggacacagcgtggaggagctgtgcaaggcctttggccaggccaagcaccagccaacagccatcattgccaagaccttcaagggccgagggatcacgggggtagaagataaggagtcttggcatgggaagcccctccccaaaaacatggctgagcagatcatccaggagatctacagccagatccagagcaaaaagaagatcctggcaacccctccacaggaggacgcaccctcagtggacattgccaacatccgcatgcccagcctgcccagctacaaagttggggacaagatagccacccgcaaggcctacgggcaggcactggccaagctgggccatgccagtgaccgcatcatcgccctggatggggacaccaaaaattccaccttctcggagatcttcaaaaaggagcacccggaccgcttcatcgagtgctacattgccgagcagaacatggtgagcatcgcggtgggctgtgccacccgcaacaggacggtgcccttctgcagcacttttgcagccctcttcacgcgggcctttgaccagattcgcatggccgccatctccgagagcaacatcaacctctgcggctcccactgcggcgtttccatcggggaagacgggccctcccagatggccctagaagatctggctatgtttcggtcagtccccacatcaactgtcttttacccaagtgatggcgttgctacagagaaggcagtggaactagccgccaatacaaagggtatctgcttcatccggaccagccgcccagaaaatgccatcatctataacaacaatgaggacttccaggtcggacaagccaaggtggtcctgaagagcaaggatgaccaggtgaccgttatcggggctggggtgaccctgcacgaggccttggccgctgccgaactgctgaagaaagaaaagatcaacatccgcgtgctggaccccttcaccatcaagcccctggacagaaaactcattctcgacagcgctcgtgccaccaagggcaggatcctcaccgtggaggaccattattatgaaggtggcattggtgaggctgtgtccagtgcagtagtgggcgagcctggcatcactgtcacccacctggcagttaaccgggtaccaagaagtgggaagccagctgagctgctgaagatgtttggtatcgacagggatgccattgcacaagctgtgaggggcctcatcaccaaggcctagggcgggtatgaagtgtggggcgggggtctatacattcctgagattctgggaaaggtgctcaaagatgtactgagaggaggggtaaatatatgttttgagaaaaatgaaaaaaaaaaaaaaaaaaaaa

SEQ ID NO: 128 - protein, 623 aa, Homo sapiens
MESYHKPDQQKLQALKDTANRLRISSIQATTAAGSGHPTSCCSAAEIMAVLFFHTMRYKSQDPRNPHNDRFVLSKGHAAPILYAVWAEAGFLAEAELLNLRKISSDLDGHPVPKQAFTDVATGSLGQGLGAACGMAYTGKYFDKASYRVYCLLGDGELSEGSVWEAMAFASIYKLDNLVAILDINRLGQSDPAPLQHQMDIYQKRCEAFGWHAIIVDGHSVEELCKAFGQAKHQPTAIIAKTFKGRGITGVEDKESWHGKPLPKNMAEQIIQEIYSQIQSKKKILATPPQEDAPSVDIANIRMPSLPSYKVGDKIATRKAYGQALAKLGHASDRIIALDGDTKNSTFSEIFKKEHPDRFIECYIAEQNMVSIAVGCATRNRTVPFCSTFAALFTRAFDQIRMAAISESNINLCGSHCGVSIGEDGPSQMALEDLAMFRSVPTSTVFYPSDGVATEKAVELAANTKGICFIRTSRPENAIIYNNNEDFQVGQAKVVLKSKDDQVTVIGAGVTLHEALAAAELLKKEKINIRVLDPFTIKPLDRKLILDSARATKGRILTVEDHYYEGGIGEAVSSAVVGEPGITVTHLAVNRVPRSGKPAELLKMFGIDRDAIAQAVRGLITKA

SEQ ID NO: 129 - DNA, 2078 bp, Homo sapiens
  CDS (80)..(1948)
ggcacgagggcctgtcgccgcgggagcagccgctatctctgtgtgtccgcgtgtgcgcccggtccccgcctgccgcaccatggagagctaccacaagcctgaccagcagaagctgcaggccttgaaggacacggccaaccgcctacgtatcagctccatccaggccaccactgcggcgggctctggccaccccacgtcatgctgcagcgccgcagagatcatggctgtcctctttttccacaccatgcgctacaagtcccaggacccccggaatccgcacaatgaccgctttgtgctctccaagggccatgcagctcccatcctctacgcggtctgggctgaagctggtttcctggccgaggcggagctgctgaacctgaggaagatcagctccgacttggacgggcacccggtcccgaaacaagctttcaccgacgtggccactggctccctgggccagggcctcggggccgcttgtgggatggcctacaccggcaaatacttcgacaaggccagctaccgagtctattgcttgctgggagatggggagctgtcagagggctctgtatgggaggccatggccttcgccagcatctataagctggacaaccttgtggccattctagacatcaatcgcctgggccagagtgacccggccccgctgcagcaccagatggacatctaccagaagcggtgcgaggccttcggttggcatgccatcatcgtggatggacacagcgtggaggagctgtgcaaggcctttggccaggccaagcaccagccaacagccatcattgccaagaccttcaagggccgagggatcacgggggtagaagataaggagtcttggcatgggaagcccctccccaaaaacatggctgagcagatcatccaggagatctacagccagatccagagcaaaaagaagatcctggcaacccctccacaggaggacgcaccctcagtggacattgccaacatccgcatgcccagcctgcccagctacaaagttggggacaagatagccacccgcaaggcctacgggcaggcactggccaagctgggccatgccagtgaccgcatcatcgccctggatggggacaccaaaaattccaccttctcggagatcttcaaaaaggagcacccggaccgcttcatcgagtgctacattgccgagcagaacatggtgagcatcgcggtgggctgtgccacccgcaacaggacggtgcccttctgcagcacttttgcagccttcttcacgcgggcctttgaccagattcgcatggccgccatctccgagagcaacgtcaacctctgcggctcccactgcggcgtttccatcggggaagacgggccctcccagatggccctagaagatctggctatgtttcggtcagtccccacatcaactgtcttttacccaagtgatggcgttgctacagagaaggcagtggaactagccgccaatacaaagggtatctgcttcatccggaccagccgcccagaaaatgccatcatctataacaacaatgaggacttccaggtcggacaagccaaggtggtcctgaagagcaaggatgaccaggtgaccgttatcggggctggggtgaccctgcacgaggccttggccgctgccgaactgctgaagaaagaaaagatcaacatccgcgtgctggaccccttcaccatcaagcccctggacagaaaactcattctcgacagcgctcgtgccaccaagggcaggatcctcaccgtggaggaccattattatgaaggtggcattggtgaggctgtgtccagtgcagtagtgggcgagcctggcatcactgtcacccacctggcagttaaccgggtaccaagaagtgggaagccagctgagctgctgaagatgtttggtatcgacagggatgccattgcacaagctgtgaggggcctcatcaccaaggcctagggcgggtatgaagtgtggggcgggggtctatacattcctgagattctgggaaaggtgctcaaagatgtactgagaggaggggtaaatatatgttttgagaaaaatgaaaaaaaaaaaaaaaaaaaaa

SEQ ID NO: 130 - protein, 623 aa, Homo sapiens
MESYHKPDQQKLQALKDTANRLRISSIQATTAAGSGHPTSCCSAAEIMAVLFFHTMRYKSQDPRNPHNDRFVLSKGHAAPILYAVWAEAGFLAEAELLNLRKISSDLDGHPVPKQAFTDVATGSLGQGLGAACGMAYTGKYFDKASYRVYCLLGDGELSEGSVWEAMAFASIYKLDNLVAILDINRLGQSDPAPLQHQMDIYQKRCEAFGWHAIIVDGHSVEELCKAFGQAKHQPTAIIAKTFKGRGITGVEDKESWHGKPLPKNMAEQIIQEIYSQIQSKKKILATPPQEDAPSVDIANIRMPSLPSYKVGDKIATRKAYGQALAKLGHASDRIIALDGDTKNSTFSEIFKKEHPDRFIECYIAEQNMVSIAVGCATRNRTVPFCSTFAAFFTRAFDQIRMAAISESNVNLCGSHCGVSIGEDGPSQMALEDLAMFRSVPTSTVFYPSDGVATEKAVELAANTKGICFIRTSRPENAIIYNNNEDFQVGQAKVVLKSKDDQVTVIGAGVTLHEALAAAELLKKEKINIRVLDPFTIKPLDRKLILDSARATKGRILTVEDHYYEGGIGEAVSSAVVGEPGITVTHLAVNRVPRSGKPAELLKMFGIDRDAIAQAVRGLITKA

SEQ ID NO: 131 - DNA, 2078 bp, Homo sapiens
  CDS (80)..(1948)
ggcacgagggcctgtcgccgcgggagcagccgctatctctgtgtgtccgcgtgtgcgcccggtccccgcctgccgcaccatggagagctaccacaagcctgaccagcagaagctgcaggccttgaaggacacggccaaccgcctacgtatcagctccatccaggccaccactgcggcgggctctggccaccccacgtcatgctgcagcgccgcagagatcatggctgtcctctttttccacaccatgcgctacaagtcccaggacccccggaatccgcacaatgaccgctttgtgctctccaagggccatgcagctcccatcctctacgcggtctgggctgaagctggtttcctggccgaggcggagctgctgaacctgaggaagatcagctccgacttggacgggcacccggtcccgaaacaagctttcaccgacgtggccactggctccctgggccagggcctcggggccgcttgtgggatggcctacaccggcaaatacttcgacaaggccagctaccgagtctattgcttgctgggagatggggagctgtcagagggctctgtatgggaggccatggccttcgccagcatctataagctggacaaccttgtggccattctagacatcaatcgcctgggccagagtgacccggccccgctgcagcaccagatggacatctaccagaagcggtgcgaggccttcggttggcatgccatcatcgtggatggacacagcgtggaggagctgtgcaaggcctttggccaggccaagcaccagccaacagccatcattgccaagaccttcaagggccgagggatcacgggggtagaagataaggagtcttggcatgggaagcccctccccaaaaacatggctgagcagatcatccaggagatctacagccagatccagagcaaaaagaagatcctggcaacccctccacaggaggacgcaccctcagtggacattgccaacatccgcatgcccagcctgcccagctacaaagttggggacaagatagccacccgcaaggcctacgggcaggcactggccaagctgggccatgccagtgaccgcatcatcgccctggatggggacaccaaaaattccaccttctcggagatcttcaaaaaggagcacccggaccgcttcatcgagtgctacattgccgagcagaacatggtgagcatcgcggtgggctgtgccacccgcaacaggacggtgcccttctgcagcacttttgcagccttcttcacgcgggcctttgaccagattcgcatggccgccatctccgagagcaacatcaacctctgcggctcccactgcggcgtttccatcggggaagacgggccctcccagatggccctagaagatctggctatgtttcggtcagtccccacatcaactgtcttttacccaagtgatggcgttgctacggagaaggcagtggaactagccgccaatacaaagggtatctgcttcatccggaccagccgcccagaaaatgccatcatctataacaacaatgaggacttccaggtcggacaagccaaggtggtcctgaagagcaaggatgaccaggtgaccgttatcggggctggggtgaccctgcacgaggccttggccgctgccgaactgctgaagaaagaaaagatcaacatccgcgtgctggaccccttcaccatcaagcccctggacagaaaactcattctcgacagcgctcgtgccaccaagggcaggatcctcaccgtggaggaccattattatgaaggtggcattggtgaggctgtgtccagtgcagtagtgggcgagcctggcatcactgtcacccacctggcagttaaccgggtaccaagaagtgggaagccagctgagctgctgaagatgtttggtatcgacagggatgccattgcacaagctgtgaggggcctcatcaccaaggcctagggcgggtatgaagtgtggggcgggggtctatacattcctgagattctgggaaaggtgctcaaagatgtactgagaggaggggtaaatatatgttttgagaaaaatgaaaaaaaaaaaaaaaaaaaaa

SEQ ID NO: 132 - protein, 623 aa, Homo sapiens; identical to SEQ ID NO: 8

SEQ ID NO: 133 - DNA, 2078 bp, Homo sapiens
  CDS (80)..(1948)
ggcacgagggcctgtcgccgcgggagcagccgctatctctgtgtgtccgcgtgtgcgcccggtccccgcctgccgcaccatggagagctaccacaagcctgaccagcagaagctgcaggccttgaaggacacggccaaccgcctacgtatcagctccatccaggccaccactgcggcgggctctggccaccccacgtcatgctgcagcgccgcagagatcatggctgtcctctttttccacaccatgcgctacaagtcccaggacccccggaatccgcacaatgaccgctttgtgctctccaagggccatgcagctcccatcctctacgcggtctgggctgaagctggtttcctggccgaggcggagctgctgaacctgaggaagatcagctccgacttggacgggcacccggtcccgaaacaagctttcaccgacgtggccactggctccctgggccagggcctcggggccgcttgtgggatggcctacaccggcaaatacttcgacaaggccagctaccgagtctattgcttgctgggagatggggagctgtcagagggctctgtatgggaggccatggccttcgccagcatctataagctggacaaccttgtggccattctagacatcaatcgcctgggccagagtgacccggccccgctgcagcaccagatggacatctaccagaagcggtgcgaggccttcggttggcatgccatcatcgtggatggacacagcgtggaggagctgtgcaaggcctttggccaggccaagcaccagccaacagccatcattgccaagaccttcaagggccgagggatcacgggggtagaagataaggagtcttggcatgggaagcccctccccaaaaacatggctgagcagatcatccaggagatctacagccagatccagagcaaaaagaagatcctggcaacccctccacaggaggacgcaccctcagtggacattgccaacatccgcatgcccagcctgcccagctacaaagttggggacaagatagccacccgcaaggcctacgggcaggcactggccaagctgggccatgccagtgaccgcatcatcgccctggatggggacaccaaaaattccaccttctcggagatcttcaaaaaggagcacccggaccgcttcatcgagtgctacattgccgagcagaacatggtgagcatcgcggtgggctgtgccacccgcaacaggacggtgcccttctgcagcacttttgcagccttcttcacgcgggcctttgaccagattcgcatggccgccatctccgagagcaacatcaacctctgcggctcccactgcggcgtttccatcggggaagacgggccctcccagatggccctagaagatctggctatgtttcggtcagtccccacatcaactgtcttttacccaagtgatggcgttgctacagagaaggcagtggaactagccgccaatacaaagggtatctgcttcatccggaccagccgcccagaaaatgccatcatttataacaacaatgaggacttccaggtcggacaagccaaggtggtcctgaagagcaaggatgaccaggtgaccgttatcggggctggggtgaccctgcacgaggccttggccgctgccgaactgctgaagaaagaaaagatcaacatccgcgtgctggaccccttcaccatcaagcccctggacagaaaactcattctcgacagcgctcgtgccaccaagggcaggatcctcaccgtggaggaccattattatgaaggtggcattggtgaggctgtgtccagtgcagtagtgggcgagcctggcatcactgtcacccacctggcagttaaccgggtaccaagaagtgggaagccagctgagctgctgaagatgtttggtatcgacagggatgccattgcacaagctgtgaggggcctcatcaccaaggcctagggcgggtatgaagtgtggggcgggggtctatacattcctgagattctgggaaaggtgctcaaagatgtactgagaggaggggtaaatatatgttttgagaaaaatgaaaaaaaaaaaaaaaaaaaaa

SEQ ID NO: 134 - protein, 623 aa, Homo sapiens; identical to SEQ ID NO: 8

SEQ ID NO: 135 - DNA, 2078 bp, Homo sapiens
  CDS (80)..(1948)
ggcacgagggcctgtcgccgcgggagcagccgctatctctgtgtgtccgcgtgtgcgcccggtccccgcctgccgcaccatggagagctaccacaagcctgaccagcagaagctgcaggccttgaaggacacggccaaccgcctacgtatcagctccatccaggccaccactgcggcgggctctggccaccccacgtcatgctgcagcgccgcagagatcatggctgtcctctttttccacaccatgcgctacaagtcccaggacccccggaatccgcacaatgaccgctttgtgctctccaagggccatgcagctcccatcctctacgcggtctgggctgaagctggtttcctggccgaggcggagctgctgaacctgaggaagatcagctccgacttggacgggcacccggtcccgaaacaagctttcaccgacgtggccactggctccctgggccagggcctcggggccgcttgtgggatggcctacaccggcaaatacttcgacaaggccagctaccgagtctattgcttgctgggagatggggagctgtcagagggctctgtatgggaggccatggccttcgccagcatctataagctggacaaccttgtggccattctagacatcaatcgcctgggccagagtgacccggccccgctgcagcaccagatggacatctaccagaagcggtgcgaggccttcggttggcatgccatcatcgtggatggacacagcgtggaggagctgtgcaaggcctttggccaggccaagcaccagccaacagccatcattgccaagaccttcaagggccgagggatcacgggggtagaagataaggagtcttggcatgggaagcccctccccaaaaacatggctgagcagatcatccaggagatctacagccagatccagagcaaaaagaagatcctggcaacccctccacaggaggacgcaccctcagtggacattgccaacatccgcatgcccagcctgcccagctacaaagttggggacaagatagccacccgcaaggcctacgggcaggcactggccaagctgggccatgccagtgaccgcatcatcgccctggatggggacaccaaaaattccaccttctcggagatcttcaaaaaggagcacccggaccgcttcatcgagtgctacattgccgagcagaacatggtgagcatcgcggtgggctgtgccacccgcaacaggacggtgcccttctgcagcacttttgcagccttcttcacgcgggcctttgaccagattcgcatggccgccatctccgagagcaacatcaacctctgcggctcccactgcggcgtttccatcggggaagacgggccctcccagatggccctagaagatctggctatgtttcggtcagtccccacatcaactgtcttttacccaagtgatggcgttgctacagagaaggcagtggaactagccgccaatacaaagggtatctgcttcatccggaccagccgcccagaaaatgccatcatctataacaacgatgaggacttccaggtcggacaagccaaggtggtcctgaagagcaaggatgaccaggtgaccgttatcggggctggggtgaccctgcacgaggccttggccgctgccgaactgctgaagaaagaaaagatcaacatccgcgtgctggaccccttcaccatcaagcccctggacagaaaactcattctcgacagcgctcgtgccaccaagggcaggatcctcaccgtggaggaccattattatgaaggtggcattggtgaggctgtgtccagtgcagtagtgggcgagcctggcatcactgtcacccacctggcagttaaccgggtaccaagaagtgggaagccagctgagctgctgaagatgtttggtatcgacagggatgccattgcacaagctgtgaggggcctcatcaccaaggcctagggcgggtatgaagtgtggggcgggggtctatacattcctgagattctgggaaaggtgctcaaagatgtactgagaggaggggtaaatatatgttttgagaaaaatgaaaaaaaaaaaaaaaaaaaaa

SEQ ID NO: 136 - protein, 623 aa, Homo sapiens
MESYHKPDQQKLQALKDTANRLRISSIQATTAAGSGHPTSCCSAAEIMAVLFFHTMRYKSQDPRNPHNDRFVLSKGHAAPILYAVWAEAGFLAEAELLNLRKISSDLDGHPVPKQAFTDVATGSLGQGLGAACGMAYTGKYFDKASYRVYCLLGDGELSEGSVWEAMAFASIYKLDNLVAILDINRLGQSDPAPLQHQMDIYQKRCEAFGWHAIIVDGHSVEELCKAFGQAKHQPTAIIAKTFKGRGITGVEDKESWHGKPLPKNMAEQIIQEIYSQIQSKKKILATPPQEDAPSVDIANIRMPSLPSYKVGDKIATRKAYGQALAKLGHASDRIIALDGDTKNSTFSEIFKKEHPDRFIECYIAEQNMVSIAVGCATRNRTVPFCSTFAAFFTRAFDQIRMAAISESNINLCGSHCGVSIGEDGPSQMALEDLAMFRSVPTSTVFYPSDGVATEKAVELAANTKGICFIRTSRPENAIIYNNDEDFQVGQAKVVLKSKDDQVTVIGAGVTLHEALAAAELLKKEKINIRVLDPFTIKPLDRKLILDSARATKGRILTVEDHYYEGGIGEAVSSAVVGEPGITVTHLAVNRVPRSGKPAELLKMFGIDRDAIAQAVRGLITKA

SEQ ID NO: 137 - DNA, 2078 bp, Homo sapiens
ggcacgagggcctgtcgccgcgggagcagccgctatctctgtgtgtccgcgtgtgcgcccggtccccgcctgccgcaccatggagagctaccacaagcctgaccagcagaagctgcaggccttgaaggacacggccaaccgcctacgtatcagctccatccaggccaccactgcggcgggctctggccaccccacgtcatgctgcagcgccgcagagatcatggctgtcctctttttccacaccatgcgctacaagtcccaggacccccggaatccgcacaatgaccgctttgtgctctccaagggccatgcagctcccatcctctacgcggtctgggctgaagctggtttcctggccgaggcggagctgctgaacctgaggaagatcagctccgacttggacgggcacccggtcccgaaacaagctttcaccgacgtggccactggctccctgggccagggcctcggggccgcttgtgggatggcctacaccggcaaatacttcgacaaggccagctaccgagtctattgcttgctgggagatggggagctgtcagagggctctgtatgggaggccatggccttcgccagcatctataagctggacaaccttgtggccattctagacatcaatcgcctgggccagagtgacccggccccgctgcagcaccagatggacatctaccagaagcggtgcgaggccttcggttggcatgccatcatcgtggatggacacagcgtggaggagctgtgcaaggcctttggccaggccaagcaccagccaacagccatcattgccaagaccttcaagggccgagggatcacgggggtagaagataaggagtcttggcatgggaagcccctccccaaaaacatggctgagcagatcatccaggagatctacagccagatccagagcaaaaagaagatcctggcaacccctccacaggaggacgcaccctcagtggacattgccaacatccgcatgcccagcctgcccagctacaaagttggggacaagatagccacccgcaaggcctacgggcaggcactggccaagctgggccatgccagtgaccgcatcatcgccctggatggggacaccaaaaattccaccttctcggagatcttcaaaaaggagcacccggaccgcttcatcgagtgctacattgccgagcagaacatggtgagcatcgcggtgggctgtgccacccgcaacaggacggtgcccttctgcagcacttttgcagccttcttcacgcgggcctttgaccagattcgcatggccgccatctccgagagcaacatcaacctctgcggctcccactgcggcgtttccatcggggaagacgggccctcccagatggccctagaagatctggctatgtttcggtcagtccccacatcaactgtcttttacccaagtgatggcgttgctacagagaaggcagtggaactagccgccaatacaaagggtatctgcttcatccggaccagccgcccagaaaatgccatcatctataacaacaatgaggacttccaggtcggataagccaaggtggtcctgaagagcaaggatgaccaggtgaccgttatcggggctggggtgaccctgcacgaggccttggccgctgccgaactgctgaagaaagaaaagatcaacatccgcgtgctggaccccttcaccatcaagcccctggacagaaaactcattctcgacagcgctcgtgccaccaagggcaggatcctcaccgtggaggaccattattatgaaggtggcattggtgaggctgtgtccagtgcagtagtgggcgagcctggcatcactgtcacccacctggcagttaaccgggtaccaagaagtgggaagccagctgagctgctgaagatgtttggtatcgacagggatgccattgcacaagctgtgaggggcctcatcaccaaggcctagggcgggtatgaagtgtggggcgggggtctatacattcctgagattctgggaaaggtgctcaaagatgtactgagaggaggggtaaatatatgttttgagaaaaatgaaaaaaaaaaaaaaaaaaaaa

SEQ ID NO: 138 - protein, 622 aa, Homo sapiens
MESYHKPDQQKLQALKDTANRLRISSIQATTAAGSGHPTSCCSAAEIMAVLFFHTMRYKSQDPRNPHNDRFVLSKGHAAPILYAVWAEAGFLAEAELLNLRKISSDLDGHPVPKQAFTDVATGSLGQGLGAACGMAYTGKYFDKASYRVYCLLGDGELSEGSVWEAMAFASIYKLDNLVAILDINRLGQSDPAPLQHQMDIYQKRCEAFGWHAIIVDGHSVEELCKAFGQAKHQPTAIIAKTFKGRGITGVEDKESWHGKPLPKNMAEQIIQEIYSQIQSKKKILATPPQEDAPSVDIANIRMPSLPSYKVGDKIATRKAYGQALAKLGHASDRIIALDGDTKNSTFSEIFKKEHPDRFIECYIAEQNMVSIAVGCATRNRTVPFCSTFAAFFTRAFDQIRMAAISESNINLCGSHCGVSIGEDGPSQMALEDLAMFRSVPTSTVFYPSDGVATEKAVELAANTKGICFIRTSRPENAIIYNNNEDFQVGAKVVLKSKDDQVTVIGAGVTLHEALAAAELLKKEKINIRVLDPFTIKPLDRKLILDSARATKGRILTVEDHYYEGGIGEAVSSAVVGEPGITVTHLAVNRVPRSGKPAELLKMFGIDRDAIAQAVRGLITKA

SEQ ID NO: 139 - DNA, 2078 bp, Homo sapiens
  CDS (80)..(1948)
ggcacgagggcctgtcgccgcgggagcagccgctatctctgtgtgtccgcgtgtgcgcccggtccccgcctgccgcaccatggagagctaccacaagcctgaccagcagaagctgcaggccttgaaggacacggccaaccgcctacgtatcagctccatccaggccaccactgcggcgggctctggccaccccacgtcatgctgcagcgccgcagagatcatggctgtcctctttttccacaccatgcgctacaagtcccaggacccccggaatccgcacaatgaccgctttgtgctctccaagggccatgcagctcccatcctctacgcggtctgggctgaagctggtttcctggccgaggcggagctgctgaacctgaggaagatcagctccgacttggacgggcacccggtcccgaaacaagctttcaccgacgtggccactggctccctgggccagggcctcggggccgcttgtgggatggcctacaccggcaaatacttcgacaaggccagctaccgagtctattgcttgctgggagatggggagctgtcagagggctctgtatgggaggccatggccttcgccagcatctataagctggacaaccttgtggccattctagacatcaatcgcctgggccagagtgacccggccccgctgcagcaccagatggacatctaccagaagcggtgcgaggccttcggttggcatgccatcatcgtggatggacacagcgtggaggagctgtgcaaggcctttggccaggccaagcaccagccaacagccatcattgccaagaccttcaagggccgagggatcacgggggtagaagataaggagtcttggcatgggaagcccctccccaaaaacatggctgagcagatcatccaggagatctacagccagatccagagcaaaaagaagatcctggcaacccctccacaggaggacgcaccctcagtggacattgccaacatccgcatgcccagcctgcccagctacaaagttggggacaagatagccacccgcaaggcctacgggcaggcactggccaagctgggccatgccagtgaccgcatcatcgccctggatggggacaccaaaaattccaccttctcggagatcttcaaaaaggagcacccggaccgcttcatcgagtgctacattgccgagcagaacatggtgagcatcgcggtgggctgtgccacccgcaacaggacggtgcccttctgcagcacttttgcagccttcttcacgcgggcctttgaccagattcgcatggccgccatctccgagagcaacatcaacctctgcggctcccactgcggcgtttccatcggggaagacgggccctcccagatggccctagaagatctggctatgtttcggtcagtccccacatcaactgtcttttacccaagtgatggcgttgctacagagaaggcagtggaactagccgccaatacaaagggtatctgcttcatccggaccagccgcccagaaaatgccatcatctataacaacaatgaggacttccaggtcggacaagccaaggtggtcctgaagagcaaggatgaccaggtgaccgttatcggggccggggtgaccctgcacgaggccttggccgctgccgaactgctgaagaaagaaaagatcaacatccgcgtgctggaccccttcaccatcaagcccctggacagaaaactcattctcgacagcgctcgtgccaccaagggcaggatcctcaccgtggaggaccattattatgaaggtggcattggtgaggctgtgtccagtgcagtagtgggcgagcctggcatcactgtcacccacctggcagttaaccgggtaccaagaagtgggaagccagctgagctgctgaagatgtttggtatcgacagggatgccattgcacaagctgtgaggggcctcatcaccaaggcctagggcgggtatgaagtgtggggcgggggtctatacattcctgagattctgggaaaggtgctcaaagatgtactgagaggaggggtaaatatatgttttgagaaaaatgaaaaaaaaaaaaaaaaaaaaa

SEQ ID NO: 140 - protein, 623 aa, Homo sapiens; identical to SEQ ID NO: 8

SEQ ID NO: 141 - DNA, 2078 bp, Homo sapiens
  CDS (80)..(1948)
ggcacgagggcctgtcgccgcgggagcagccgctatctctgtgtgtccgcgtgtgcgcccggtccccgcctgccgcaccatggagagctaccacaagcctgaccagcagaagctgcaggccttgaaggacacggccaaccgcctacgtatcagctccatccaggccaccactgcggcgggctctggccaccccacgtcatgctgcagcgccgcagagatcatggctgtcctctttttccacaccatgcgctacaagtcccaggacccccggaatccgcacaatgaccgctttgtgctctccaagggccatgcagctcccatcctctacgcggtctgggctgaagctggtttcctggccgaggcggagctgctgaacctgaggaagatcagctccgacttggacgggcacccggtcccgaaacaagctttcaccgacgtggccactggctccctgggccagggcctcggggccgcttgtgggatggcctacaccggcaaatacttcgacaaggccagctaccgagtctattgcttgctgggagatggggagctgtcagagggctctgtatgggaggccatggccttcgccagcatctataagctggacaaccttgtggccattctagacatcaatcgcctgggccagagtgacccggccccgctgcagcaccagatggacatctaccagaagcggtgcgaggccttcggttggcatgccatcatcgtggatggacacagcgtggaggagctgtgcaaggcctttggccaggccaagcaccagccaacagccatcattgccaagaccttcaagggccgagggatcacgggggtagaagataaggagtcttggcatgggaagcccctccccaaaaacatggctgagcagatcatccaggagatctacagccagatccagagcaaaaagaagatcctggcaacccctccacaggaggacgcaccctcagtggacattgccaacatccgcatgcccagcctgcccagctacaaagttggggacaagatagccacccgcaaggcctacgggcaggcactggccaagctgggccatgccagtgaccgcatcatcgccctggatggggacaccaaaaattccaccttctcggagatcttcaaaaaggagcacccggaccgcttcatcgagtgctacattgccgagcagaacatggtgagcatcgcggtgggctgtgccacccgcaacaggacggtgcccttctgcagcacttttgcagccttcttcacgcgggcctttgaccagattcgcatggccgccatctccgagagcaacatcaacctctgcggctcccactgcggcgtttccatcggggaagacgggccctcccagatggccctagaagatctggctatgtttcggtcagtccccacatcaactgtcttttacccaagtgatggcgttgctacagagaaggcagtggaactagccgccaatacaaagggtatctgcttcatccggaccagccgcccagaaaatgccatcatctataacaacaatgaggacttccaggtcggacaagccaaggtggtcctgaagagcaaggatgaccaggtgaccgttatcggggctggggtgaccctgcacgaggccttggccgctgccgaactgcttaagaaagaaaagatcaacatccgcgtgctggaccccttcaccatcaagcccctggacagaaaactcattctcgacagcgctcgtgccaccaagggcaggatcctcaccgtggaggaccattattatgaaggtggcattggtgaggctgtgtccagtgcagtagtgggcgagcctggcatcactgtcacccacctggcagttaaccgggtaccaagaagtgggaagccagctgagctgctgaagatgtttggtatcgacagggatgccattgcacaagctgtgaggggcctcatcaccaaggcctagggcgggtatgaagtgtggggcgggggtctatacattcctgagattctgggaaaggtgctcaaagatgtactgagaggaggggtaaatatatgttttgagaaaaatgaaaaaaaaaaaaaaaaaaaaa

SEQ ID NO: 142 - protein, 623 aa, Homo sapiens; identical to SEQ ID NO: 8

SEQ ID NO: 143 - DNA, 2078 bp, Homo sapiens
  CDS (80)..(1948)
ggcacgagggcctgtcgccgcgggagcagccgctatctctgtgtgtccgcgtgtgcgcccggtccccgcctgccgcaccatggagagctaccacaagcctgaccagcagaagctgcaggccttgaaggacacggccaaccgcctacgtatcagctccatccaggccaccactgcggcgggctctggccaccccacgtcatgctgcagcgccgcagagatcatggctgtcctctttttccacaccatgcgctacaagtcccaggacccccggaatccgcacaatgaccgctttgtgctctccaagggccatgcagctcccatcctctacgcggtctgggctgaagctggtttcctggccgaggcggagctgctgaacctgaggaagatcagctccgacttggacgggcacccggtcccgaaacaagctttcaccgacgtggccactggctccctgggccagggcctcggggccgcttgtgggatggcctacaccggcaaatacttcgacaaggccagctaccgagtctattgcttgctgggagatggggagctgtcagagggctctgtatgggaggccatggccttcgccagcatctataagctggacaaccttgtggccattctagacatcaatcgcctgggccagagtgacccggccccgctgcagcaccagatggacatctaccagaagcggtgcgaggccttcggttggcatgccatcatcgtggatggacacagcgtggaggagctgtgcaaggcctttggccaggccaagcaccagccaacagccatcattgccaagaccttcaagggccgagggatcacgggggtagaagataaggagtcttggcatgggaagcccctccccaaaaacatggctgagcagatcatccaggagatctacagccagatccagagcaaaaagaagatcctggcaacccctccacaggaggacgcaccctcagtggacattgccaacatccgcatgcccagcctgcccagctacaaagttggggacaagatagccacccgcaaggcctacgggcaggcactggccaagctgggccatgccagtgaccgcatcatcgccctggatggggacaccaaaaattccaccttctcggagatcttcaaaaaggagcacccggaccgcttcatcgagtgctacattgccgagcagaacatggtgagcatcgcggtgggctgtgccacccgcaacaggacggtgcccttctgcagcacttttgcagccttcttcacgcgggcctttgaccagattcgcatggccgccatctccgagagcaacatcaacctctgcggctcccactgcggcgtttccatcggggaagacgggccctcccagatggccctagaagatctggctatgtttcggtcagtccccacatcaactgtcttttacccaagtgatggcgttgctacagagaaggcagtggaactagccgccaatacaaagggtatctgcttcatccggaccagccgcccagaaaatgccatcatctataacaacaatgaggacttccaggtcggacaagccaaggtggtcctgaagagcaaggatgaccaggtgaccgttatcggggctggggtgaccctgcacgaggccttggccgctgccgaactgctgaagaaagaaaagatcaacatccgcgtgctggacccctccaccatcaagcccctggacagaaaactcattctcgacagcgctcgtgccaccaagggcaggatcctcaccgtggaggaccattattatgaaggtggcattggtgaggctgtgtccagtgcagtagtgggcgagcctggcatcactgtcacccacctggcagttaaccgggtaccaagaagtgggaagccagctgagctgctgaagatgtttggtatcgacagggatgccattgcacaagctgtgaggggcctcatcaccaaggcctagggcgggtatgaagtgtggggcgggggtctatacattcctgagattctgggaaaggtgctcaaagatgtactgagaggaggggtaaatatatgttttgagaaaaatgaaaaaaaaaaaaaaaaaaaaa

SEQ ID NO: 144 - protein, 623 aa, Homo sapiens
MESYHKPDQQKLQALKDTANRLRISSIQATTAAGSGHPTSCCSAAEIMAVLFFHTMRYKSQDPRNPHNDRFVLSKGHAAPILYAVWAEAGFLAEAELLNLRKISSDLDGHPVPKQAFTDVATGSLGQGLGAACGMAYTGKYFDKASYRVYCLLGDGELSEGSVWEAMAFASIYKLDNLVAILDINRLGQSDPAPLQHQMDIYQKRCEAFGWHAIIVDGHSVEELCKAFGQAKHQPTAIIAKTFKGRGITGVEDKESWHGKPLPKNMAEQIIQEIYSQIQSKKKILATPPQEDAPSVDIANIRMPSLPSYKVGDKIATRKAYGQALAKLGHASDRIIALDGDTKNSTFSEIFKKEHPDRFIECYIAEQNMVSIAVGCATRNRTVPFCSTFAAFFTRAFDQIRMAAISESNINLCGSHCGVSIGEDGPSQMALEDLAMFRSVPTSTVFYPSDGVATEKAVELAANTKGICFIRTSRPENAIIYNNNEDFQVGQAKVVLKSKDDQVTVIGAGVTLHEALAAAELLKKEKINIRVLDPSTIKPLDRKLILDSARATKGRILTVEDHYYEGGIGEAVSSAVVGEPGITVTHLAVNRVPRSGKPAELLKMFGIDRDAIAQAVRGLITKA

SEQ ID NO: 145 - DNA, 2078 bp, Homo sapiens
  CDS (80)..(1948)
ggcacgagggcctgtcgccgcgggagcagccgctatctctgtgtgtccgcgtgtgcgcccggtccccgcctgccgcaccatggagagctaccacaagcctgaccagcagaagctgcaggccttgaaggacacggccaaccgcctacgtatcagctccatccaggccaccactgcggcgggctctggccaccccacgtcatgctgcagcgccgcagagatcatggctgtcctctttttccacaccatgcgctacaagtcccaggacccccggaatccgcacaatgaccgctttgtgctctccaagggccatgcagctcccatcctctacgcggtctgggctgaagctggtttcctggccgaggcggagctgctgaacctgaggaagatcagctccgacttggacgggcacccggtcccgaaacaagctttcaccgacgtggccactggctccctgggccagggcctcggggccgcttgtgggatggcctacaccggcaaatacttcgacaaggccagctaccgagtctattgcttgctgggagatggggagctgtcagagggctctgtatgggaggccatggccttcgccagcatctataagctggacaaccttgtggccattctagacatcaatcgcctgggccagagtgacccggccccgctgcagcaccagatggacatctaccagaagcggtgcgaggccttcggttggcatgccatcatcgtggatggacacagcgtggaggagctgtgcaaggcctttggccaggccaagcaccagccaacagccatcattgccaagaccttcaagggccgagggatcacgggggtagaagataaggagtcttggcatgggaagcccctccccaaaaacatggctgagcagatcatccaggagatctacagccagatccagagcaaaaagaagatcctggcaacccctccacaggaggacgcaccctcagtggacattgccaacatccgcatgcccagcctgcccagctacaaagttggggacaagatagccacccgcaaggcctacgggcaggcactggccaagctgggccatgccagtgaccgcatcatcgccctggatggggacaccaaaaattccaccttctcggagatcttcaaaaaggagcacccggaccgcttcatcgagtgctacattgccgagcagaacatggtgagcatcgcggtgggctgtgccacccgcaacaggacggtgcccttctgcagcacttttgcagccttcttcacgcgggcctttgaccagattcgcatggccgccatctccgagagcaacatcaacctctgcggctcccactgcggcgtttccatcggggaagacgggccctcccagatggccctagaagatctggctatgtttcggtcagtccccacatcaactgtcttttacccaagtgatggcgttgctacagagaaggcagtggaactagccgccaatacaaagggtatctgcttcatccggaccagccgcccagaaaatgccatcatctataacaacaatgaggacttccaggtcggacaagccaaggtggtcctgaagagcaaggatgaccaggtgaccgttatcggggctggggtgaccctgcacgaggccttggccgctgccgaactgctgaagaaagaaaagatcaacatccgcgtgctggaccccttcaccatcaagcccctggacagaaaactcattctcgacagcgctcgtgccaccaagggcaggatcctcaccgtggaggaccattattatgaaggtggcatcggtgaggctgtgtccagtgcagtagtgggcgagcctggcatcactgtcacccacctggcagttaaccgggtaccaagaagtgggaagccagctgagctgctgaagatgtttggtatcgacagggatgccattgcacaagctgtgaggggcctcatcaccaaggcctagggcgggtatgaagtgtggggcgggggtctatacattcctgagattctgggaaaggtgctcaaagatgtactgagaggaggggtaaatatatgttttgagaaaaatgaaaaaaaaaaaaaaaaaaaaa

SEQ ID NO: 146 - protein, 623 aa, Homo sapiens; identical to SEQ ID NO: 8

SEQ ID NO: 147 - DNA, 2078 bp, Homo sapiens
  CDS (80)..(1948)
ggcacgagggcctgtcgccgcgggagcagccgctatctctgtgtgtccgcgtgtgcgcccggtccccgcctgccgcaccatggagagctaccacaagcctgaccagcagaagctgcaggccttgaaggacacggccaaccgcctacgtatcagctccatccaggccaccactgcggcgggctctggccaccccacgtcatgctgcagcgccgcagagatcatggctgtcctctttttccacaccatgcgctacaagtcccaggacccccggaatccgcacaatgaccgctttgtgctctccaagggccatgcagctcccatcctctacgcggtctgggctgaagctggtttcctggccgaggcggagctgctgaacctgaggaagatcagctccgacttggacgggcacccggtcccgaaacaagctttcaccgacgtggccactggctccctgggccagggcctcggggccgcttgtgggatggcctacaccggcaaatacttcgacaaggccagctaccgagtctattgcttgctgggagatggggagctgtcagagggctctgtatgggaggccatggccttcgccagcatctataagctggacaaccttgtggccattctagacatcaatcgcctgggccagagtgacccggccccgctgcagcaccagatggacatctaccagaagcggtgcgaggccttcggttggcatgccatcatcgtggatggacacagcgtggaggagctgtgcaaggcctttggccaggccaagcaccagccaacagccatcattgccaagaccttcaagggccgagggatcacgggggtagaagataaggagtcttggcatgggaagcccctccccaaaaacatggctgagcagatcatccaggagatctacagccagatccagagcaaaaagaagatcctggcaacccctccacaggaggacgcaccctcagtggacattgccaacatccgcatgcccagcctgcccagctacaaagttggggacaagatagccacccgcaaggcctacgggcaggcactggccaagctgggccatgccagtgaccgcatcatcgccctggatggggacaccaaaaattccaccttctcggagatcttcaaaaaggagcacccggaccgcttcatcgagtgctacattgccgagcagaacatggtgagcatcgcggtgggctgtgccacccgcaacaggacggtgcccttctgcagcacttttgcagccttcttcacgcgggcctttgaccagattcgcatggccgccatctccgagagcaacatcaacctctgcggctcccactgcggcgtttccatcggggaagacgggccctcccagatggccctagaagatctggctatgtttcggtcagtccccacatcaactgtcttttacccaagtgatggcgttgctacagagaaggcagtggaactagccgccaatacaaagggtatctgcttcatccggaccagccgcccagaaaatgccatcatctataacaacaatgaggacttccaggtcggacaagccaaggtggtcctgaagagcaaggatgaccaggtgaccgttatcggggctggggtgaccctgcacgaggccttggccgctgccgaactgctgaagaaagaaaagatcaacatccgcgtgctggaccccttcaccatcaagcccctggacagaaaactcattctcgacagcgctcgtgccaccaagggcaggatcctcaccgtggaggaccattattatgaaggtggcattggtgaggctgtgtccagtacagtagtgggcgagcctggcatcactgtcacccacctggcagttaaccgggtaccaagaagtgggaagccagctgagctgctgaagatgtttggtatcgacagggatgccattgcacaagctgtgaggggcctcatcaccaaggcctagggcgggtatgaagtgtggggcgggggtctatacattcctgagattctgggaaaggtgctcaaagatgtactgagaggaggggtaaatatatgttttgagaaaaatgaaaaaaaaaaaaaaaaaaaaa

SEQ ID NO: 148 - protein, 623 aa, Homo sapiens
MESYHKPDQQKLQALKDTANRLRISSIQATTAAGSGHPTSCCSAAEIMAVLFFHTMRYKSQDPRNPHNDRFVLSKGHAAPILYAVWAEAGFLAEAELLNLRKISSDLDGHPVPKQAFTDVATGSLGQGLGAACGMAYTGKYFDKASYRVYCLLGDGELSEGSVWEAMAFASIYKLDNLVAILDINRLGQSDPAPLQHQMDIYQKRCEAFGWHAIIVDGHSVEELCKAFGQAKHQPTAIIAKTFKGRGITGVEDKESWHGKPLPKNMAEQIIQEIYSQIQSKKKILATPPQEDAPSVDIANIRMPSLPSYKVGDKIATRKAYGQALAKLGHASDRIIALDGDTKNSTFSEIFKKEHPDRFIECYIAEQNMVSIAVGCATRNRTVPFCSTFAAFFTRAFDQIRMAAISESNINLCGSHCGVSIGEDGPSQMALEDLAMFRSVPTSTVFYPSDGVATEKAVELAANTKGICFIRTSRPENAIIYNNNEDFQVGQAKVVLKSKDDQVTVIGAGVTLHEALAAAELLKKEKINIRVLDPFTIKPLDRKLILDSARATKGRILTVEDHYYEGGIGEAVSSTVVGEPGITVTHLAVNRVPRSGKPAELLKMFGIDRDAIAQAVRGLITKA

SEQ ID NO: 149 - DNA, 2078 bp, Homo sapiens
  CDS (80)..(1948)
ggcacgagggcctgtcgccgcgggagcagccgctatctctgtgtgtccgcgtgtgcgcccggtccccgcctgccgcaccatggagagctaccacaagcctgaccagcagaagctgcaggccttgaaggacacggccaaccgcctacgtatcagctccatccaggccaccactgcggcgggctctggccaccccacgtcatgctgcagcgccgcagagatcatggctgtcctctttttccacaccatgcgctacaagtcccaggacccccggaatccgcacaatgaccgctttgtgctctccaagggccatgcagctcccatcctctacgcggtctgggctgaagctggtttcctggccgaggcggagctgctgaacctgaggaagatcagctccgacttggacgggcacccggtcccgaaacaagctttcaccgacgtggccactggctccctgggccagggcctcggggccgcttgtgggatggcctacaccggcaaatacttcgacaaggccagctaccgagtctattgcttgctgggagatggggagctgtcagagggctctgtatgggaggccatggccttcgccagcatctataagctggacaaccttgtggccattctagacatcaatcgcctgggccagagtgacccggccccgctgcagcaccagatggacatctaccagaagcggtgcgaggccttcggttggcatgccatcatcgtggatggacacagcgtggaggagctgtgcaaggcctttggccaggccaagcaccagccaacagccatcattgccaagaccttcaagggccgagggatcacgggggtagaagataaggagtcttggcatgggaagcccctccccaaaaacatggctgagcagatcatccaggagatctacagccagatccagagcaaaaagaagatcctggcaacccctccacaggaggacgcaccctcagtggacattgccaacatccgcatgcccagcctgcccagctacaaagttggggacaagatagccacccgcaaggcctacgggcaggcactggccaagctgggccatgccagtgaccgcatcatcgccctggatggggacaccaaaaattccaccttctcggagatcttcaaaaaggagcacccggaccgcttcatcgagtgctacattgccgagcagaacatggtgagcatcgcggtgggctgtgccacccgcaacaggacggtgcccttctgcagcacttttgcagccttcttcacgcgggcctttgaccagattcgcatggccgccatctccgagagcaacatcaacctctgcggctcccactgcggcgtttccatcggggaagacgggccctcccagatggccctagaagatctggctatgtttcggtcagtccccacatcaactgtcttttacccaagtgatggcgttgctacagagaaggcagtggaactagccgccaatacaaagggtatctgcttcatccggaccagccgcccagaaaatgccatcatctataacaacaatgaggacttccaggtcggacaagccaaggtggtcctgaagagcaaggatgaccaggtgaccgttatcggggctggggtgaccctgcacgaggccttggccgctgccgaactgctgaagaaagaaaagatcaacatccgcgtgctggaccccttcaccatcaagcccctggacagaaaactcattctcgacagcgctcgtgccaccaagggcaggatcctcaccgtggaggaccattattatgaaggtggcattggtgaggctgtgtccagtgcagtagtgggtgagcctggcatcactgtcacccacctggcagttaaccgggtaccaagaagtgggaagccagctgagctgctgaagatgtttggtatcgacagggatgccattgcacaagctgtgaggggcctcatcaccaaggcctagggcgggtatgaagtgtggggcgggggtctatacattcctgagattctgggaaaggtgctcaaagatgtactgagaggaggggtaaatatatgttttgagaaaaatgaaaaaaaaaaaaaaaaaaaaa

SEQ ID NO: 150 - protein, 623 aa, Homo sapiens; identical to SEQ ID NO: 8

SEQ ID NO: 151 - DNA, 2078 bp, Homo sapiens
  CDS (80)..(1948)
ggcacgagggcctgtcgccgcgggagcagccgctatctctgtgtgtccgcgtgtgcgcccggtccccgcctgccgcaccatggagagctaccacaagcctgaccagcagaagctgcaggccttgaaggacacggccaaccgcctacgtatcagctccatccaggccaccactgcggcgggctctggccaccccacgtcatgctgcagcgccgcagagatcatggctgtcctctttttccacaccatgcgctacaagtcccaggacccccggaatccgcacaatgaccgctttgtgctctccaagggccatgcagctcccatcctctacgcggtctgggctgaagctggtttcctggccgaggcggagctgctgaacctgaggaagatcagctccgacttggacgggcacccggtcccgaaacaagctttcaccgacgtggccactggctccctgggccagggcctcggggccgcttgtgggatggcctacaccggcaaatacttcgacaaggccagctaccgagtctattgcttgctgggagatggggagctgtcagagggctctgtatgggaggccatggccttcgccagcatctataagctggacaaccttgtggccattctagacatcaatcgcctgggccagagtgacccggccccgctgcagcaccagatggacatctaccagaagcggtgcgaggccttcggttggcatgccatcatcgtggatggacacagcgtggaggagctgtgcaaggcctttggccaggccaagcaccagccaacagccatcattgccaagaccttcaagggccgagggatcacgggggtagaagataaggagtcttggcatgggaagcccctccccaaaaacatggctgagcagatcatccaggagatctacagccagatccagagcaaaaagaagatcctggcaacccctccacaggaggacgcaccctcagtggacattgccaacatccgcatgcccagcctgcccagctacaaagttggggacaagatagccacccgcaaggcctacgggcaggcactggccaagctgggccatgccagtgaccgcatcatcgccctggatggggacaccaaaaattccaccttctcggagatcttcaaaaaggagcacccggaccgcttcatcgagtgctacattgccgagcagaacatggtgagcatcgcggtgggctgtgccacccgcaacaggacggtgcccttctgcagcacttttgcagccttcttcacgcgggcctttgaccagattcgcatggccgccatctccgagagcaacatcaacctctgcggctcccactgcggcgtttccatcggggaagacgggccctcccagatggccctagaagatctggctatgtttcggtcagtccccacatcaactgtcttttacccaagtgatggcgttgctacagagaaggcagtggaactagccgccaatacaaagggtatctgcttcatccggaccagccgcccagaaaatgccatcatctataacaacaatgaggacttccaggtcggacaagccaaggtggtcctgaagagcaaggatgaccaggtgaccgttatcggggctggggtgaccctgcacgaggccttggccgctgccgaactgctgaagaaagaaaagatcaacatccgcgtgctggaccccttcaccatcaagcccctggacagaaaactcattctcgacagcgctcgtgccaccaagggcaggatcctcaccgtggaggaccattattatgaaggtggcattggtgaggctgtgtccagtgcagtagtgggcgagcctggcatcactgtcgcccacctggcagttaaccgggtaccaagaagtgggaagccagctgagctgctgaagatgtttggtatcgacagggatgccattgcacaagctgtgaggggcctcatcaccaaggcctagggcgggtatgaagtgtggggcgggggtctatacattcctgagattctgggaaaggtgctcaaagatgtactgagaggaggggtaaatatatgttttgagaaaaatgaaaaaaaaaaaaaaaaaaaaa

SEQ ID NO: 152 - protein, 623 aa, Homo sapiens
MESYHKPDQQKLQALKDTANRLRISSIQATTAAGSGHPTSCCSAAEIMAVLFFHTMRYKSQDPRNPHNDRFVLSKGHAAPILYAVWAEAGFLAEAELLNLRKISSDLDGHPVPKQAFTDVATGSLGQGLGAACGMAYTGKYFDKASYRVYCLLGDGELSEGSVWEAMAFASIYKLDNLVAILDINRLGQSDPAPLQHQMDIYQKRCEAFGWHAIIVDGHSVEELCKAFGQAKHQPTAIIAKTFKGRGITGVEDKESWHGKPLPKNMAEQIIQEIYSQIQSKKKILATPPQEDAPSVDIANIRMPSLPSYKVGDKIATRKAYGQALAKLGHASDRIIALDGDTKNSTFSEIFKKEHPDRFIECYIAEQNMVSIAVGCATRNRTVPFCSTFAAFFTRAFDQIRMAAISESNINLCGSHCGVSIGEDGPSQMALEDLAMFRSVPTSTVFYPSDGVATEKAVELAANTKGICFIRTSRPENAIIYNNNEDFQVGQAKVVLKSKDDQVTVIGAGVTLHEALAAAELLKKEKINIRVLDPFTIKPLDRKLILDSARATKGRILTVEDHYYEGGIGEAVSSAVVGEPGITVAHLAVNRVPRSGKPAELLKMFGIDRDAIAQAVRGLITKA

SEQ ID NO: 153 - DNA, 2078 bp, Homo sapiens
  CDS (80)..(1948)
ggcacgagggcctgtcgccgcgggagcagccgctatctctgtgtgtccgcgtgtgcgcccggtccccgcctgccgcaccatggagagctaccacaagcctgaccagcagaagctgcaggccttgaaggacacggccaaccgcctacgtatcagctccatccaggccaccactgcggcgggctctggccaccccacgtcatgctgcagcgccgcagagatcatggctgtcctctttttccacaccatgcgctacaagtcccaggacccccggaatccgcacaatgaccgctttgtgctctccaagggccatgcagctcccatcctctacgcggtctgggctgaagctggtttcctggccgaggcggagctgctgaacctgaggaagatcagctccgacttggacgggcacccggtcccgaaacaagctttcaccgacgtggccactggctccctgggccagggcctcggggccgcttgtgggatggcctacaccggcaaatacttcgacaaggccagctaccgagtctattgcttgctgggagatggggagctgtcagagggctctgtatgggaggccatggccttcgccagcatctataagctggacaaccttgtggccattctagacatcaatcgcctgggccagagtgacccggccccgctgcagcaccagatggacatctaccagaagcggtgcgaggccttcggttggcatgccatcatcgtggatggacacagcgtggaggagctgtgcaaggcctttggccaggccaagcaccagccaacagccatcattgccaagaccttcaagggccgagggatcacgggggtagaagataaggagtcttggcatgggaagcccctccccaaaaacatggctgagcagatcatccaggagatctacagccagatccagagcaaaaagaagatcctggcaacccctccacaggaggacgcaccctcagtggacattgccaacatccgcatgcccagcctgcccagctacaaagttggggacaagatagccacccgcaaggcctacgggcaggcactggccaagctgggccatgccagtgaccgcatcatcgccctggatggggacaccaaaaattccaccttctcggagatcttcaaaaaggagcacccggaccgcttcatcgagtgctacattgccgagcagaacatggtgagcatcgcggtgggctgtgccacccgcaacaggacggtgcccttctgcagcacttttgcagccttcttcacgcgggcctttgaccagattcgcatggccgccatctccgagagcaacatcaacctctgcggctcccactgcggcgtttccatcggggaagacgggccctcccagatggccctagaagatctggctatgtttcggtcagtccccacatcaactgtcttttacccaagtgatggcgttgctacagagaaggcagtggaactagccgccaatacaaagggtatctgcttcatccggaccagccgcccagaaaatgccatcatctataacaacaatgaggacttccaggtcggacaagccaaggtggtcctgaagagcaaggatgaccaggtgaccgttatcggggctggggtgaccctgcacgaggccttggccgctgccgaactgctgaagaaagaaaagatcaacatccgcgtgctggaccccttcaccatcaagcccctggacagaaaactcattctcgacagcgctcgtgccaccaagggcaggatcctcaccgtggaggaccattattatgaaggtggcattggtgaggctgtgtccagtgcagtagtgggcgagcctggcatcactgtcacccacctggcagttaaccgggtaccaagaggtgggaagccagctgagctgctgaagatgtttggtatcgacagggatgccattgcacaagctgtgaggggcctcatcaccaaggcctagggcgggtatgaagtgtggggcgggggtctatacattcctgagattctgggaaaggtgctcaaagatgtactgagaggaggggtaaatatatgttttgagaaaaatgaaaaaaaaaaaaaaaaaaaaa

SEQ ID NO: 154 - protein, 623 aa, Homo sapiens
MESYHKPDQQKLQALKDTANRLRISSIQATTAAGSGHPTSCCSAAEIMAVLFFHTMRYKSQDPRNPHNDRFVLSKGHAAPILYAVWAEAGFLAEAELLNLRKISSDLDGHPVPKQAFTDVATGSLGQGLGAACGMAYTGKYFDKASYRVYCLLGDGELSEGSVWEAMAFASIYKLDNLVAILDINRLGQSDPAPLQHQMDIYQKRCEAFGWHAIIVDGHSVEELCKAFGQAKHQPTAIIAKTFKGRGITGVEDKESWHGKPLPKNMAEQIIQEIYSQIQSKKKILATPPQEDAPSVDIANIRMPSLPSYKVGDKIATRKAYGQALAKLGHASDRIIALDGDTKNSTFSEIFKKEHPDRFIECYIAEQNMVSIAVGCATRNRTVPFCSTFAAFFTRAFDQIRMAAISESNINLCGSHCGVSIGEDGPSQMALEDLAMFRSVPTSTVFYPSDGVATEKAVELAANTKGICFIRTSRPENAIIYNNNEDFQVGQAKVVLKSKDDQVTVIGAGVTLHEALAAAELLKKEKINIRVLDPFTIKPLDRKLILDSARATKGRILTVEDHYYEGGIGEAVSSAVVGEPGITVTHLAVNRVPRGGKPAELLKMFGIDRDAIAQAVRGLITKA

SEQ ID NO: 155 - DNA, 1584 bp, Homo sapiens
  CDS (49)..(1239)
gcgtcccccacaccacagacccgcgccgccgacgacccagcagccgccatgcgtctgctccgaggtgtgtttgtagttgctgctaagcgaacgccctttggagcttacggaggccttctgaaagacttcactgctactgacttgtctgaatttgctgccaaggctgccttgtctgctggcaaagtctcacctgaaacagttgacagtgtgattatgggcaatgtcctgcagagttcttcagatgctatatatttggcaaggcatgttggtttgcgtgtgggaatcccaaaggagaccccagctctcacgattaataggctctgtggttctggttttcagtccattgtgaatggatgtcaggaaatttgtgttaaagaagctgaagttgttttatgtggaggaaccgaaagcatgagccaagctccctactgtgtcagaaatgtgcgttttggaaccaagcttggatcagatatcaagctggaagattctttatgggtatcattaacagatcagcatgtccagctccccatggcaatgactgcagagaatcttactgtaaaacacaaaataagcagagaagaatgtgacaaatatgccctgcagtcacagcagagatggaaagctgctaatgatgctggctactttaatgatgaaatggcaccaattgaagtgaagacaaagaaaggaaaacagacagtgcaggtagacgagcatgctcggccccaaaccaccctggaacagttacagaaacttcctccagtattcaagaaagatggaactgttactgcagggaatgcatcgggtgtagctgatggtgctggagctgttatcatagctagtgaagatgctgttaagaaacataacttcacaccactggcaagaattgtgggctactttgtatctggatgtgatccctctatcatgggtattggtcctgtccctgctatcagtggggcactgaagaaagcaggactgagtcttaaggacatggatttggtagaggtgaatgaagcttttgctccccagtacttggctgttgagaggagtttggatcttgacataagtaaaaccaatgtgaatggaggagccattgctttgggtcacccactgggaggatctggatcaagaattactgcacacctggttcacgaattaaggcgtcgaggtggaaaatatgccgttggatcagcttgcattggaggtggccaaggtattgctgtcatcattcagagcacagcctgaagagaccagtgagctcactgtgacccatccttactctacttggccaggccacagtaaaacaagtgaccttcagagcagctgccacaactggccatgccctgccattgaaacagtgattaagtttgatcaagccatggtgacacaaaaatgcattgatcatgaataggagcccatgctagaagtacattctctcagatttgaaccagtgaaatatgatgtatttctgagctaaaactcaactatagaagacattaaaagaaatcgtattcttgccaagtaaccaccacttctgccttagataatatgattataaggaaatcaaataaatgttgccttaacttc

SEQ ID NO: 156 - protein, 397 aa, Homo sapiens
MRLLRGVFVVAAKRTPFGAYGGLLKDFTATDLSEFAAKAALSAGKVSPETVDSVIMGNVLQSSSDAIYLARHVGLRVGIPKETPALTINRLCGSGFQSIVNGCQEICVKEAEVVLCGGTESMSQAPYCVRNVRFGTKLGSDIKLEDSLWVSLTDQHVQLPMAMTAENLTVKHKISREECDKYALQSQQRWKAANDAGYFNDEMAPIEVKTKKGKQTVQVDEHARPQTTLEQLQKLPPVFKKDGTVTAGNASGVADGAGAVIIASEDAVKKHNFTPLARIVGYFVSGCDPSIMGIGPVPAISGALKKAGLSLKDMDLVEVNEAFAPQYLAVERSLDLDISKTNVNGGAIALGHPLGGSGSRITAHLVHELRRRGGKYAVGSACIGGGQGIAVIIQSTA

SEQ ID NO: 157 - DNA, 1584 bp, Homo sapiens
  CDS (49)..(1239)
gcgtcccccacaccacagacccgcgccgccgacgacccagcagccgccatgcgtctgctccgaggtgtgtttgtagttgctgctaagcgaacgccctttggagcttacggaggccttctgaaagacttcactgctactgacttgtctgaatttgctgccaaggctgccttgtctgctggcaaagtctcacctgaaacagttgacagtgtgattatgggcaatgtcctgcagagttcttcagatgctatatatttggcaaggcatgttggtttgcgtgtgggaatcccaaaggagaccccagctctcacgattaataggctctgtggttctggttttcagtccattgtgaatggatgtcaggaaatttgtgttaaagaagctgaagttgttttatgtggaggaaccgaaagcatgagccaagctccctactgtgtcagaaatgtgcgttttggaaccaagcttggatcagatatcaagctggaagattctttatgggtatcattaacagatcagcatgtccagctccccatggcaatgactgcagagaatcttactgtaaaacacaaaataagcagagaagaatgtgacaaatatgccctgcagtcacagcagagatggaaagctgctaatgatgctggctactttaatgatgaaatggcaccaattgaagtgaagacaaagaaaggaaaacagacaatgcaggtagacgagcatgctcggccccaaaccaccctggaacagttacagaaacttcctccagtattcaagaaagatggaactgttactgcagggaatgcatcgggtgtagctgatggtgctggagctgttatcatagctagtgaagatgctgttaagaaacataacttcacaccactggcaagaattgtgggctactttgtatctggatgtgatccctctatcatgggtattggtcctgtccctgctatcagtggggcactgaagaaagcaggactgagtcttaaggacatggatttggtagaggtgaatgaagcttttgctccccagtacttggctgttgagaggagtttggatcttgacataagtaaaaccaatgtgaatggaggagccattgctttgggtcacccactgggaggatctggatcaagaattactgcacacctggttcacgaattaaggcgtcgaggtggaaaatatgccgttggatcagcttgcattggaggtggccaaggtattgctgtcatcattcagagcacagcctgaagagaccggtgagctcactgtgacccatccttactctacttggccaggccacagtaaaacaagtgaccttcagagcagctgccacaactggccatgccctgccattgaaacagtgattaagtttgatcaagccatggtgacacaaaaatgcattgatcatgaataggagcccatgctagaagtacattctctcagatttgaaccagtgaaatatgatgtatttctgagctaaaactcaactatagaagacattaaaagaaatcgtattcttgccaagtaaccaccacttctgccttagataatatgattataaggaaatcaaataaatgttgccttaacttc

SEQ ID NO: 158 - protein, 397 aa, Homo sapiens; identical to SEQ ID NO: 30

SEQ ID NO: 159 - DNA, 1584 bp, Homo sapiens
  CDS (49)..(1239)
gcgtcccccacaccacagacccgcgccgccgacgacccagcagccgccatgcgtctgctccgaggtgtgtttgtagttgctgctaagcgaacgccctttggagcttacggaggccttctgaaagacttcactgctactgacttgtctgaatttgctgccaaggctgccttgtctgctggcaaagtctcacctgaaacagttgacagtgtgattatgggcaatgtcctgcagagttcttcagatgctatatatttggcaaggcatgttggtttgcgtgtgggaatcccaaaggagaccccagctctcacgattaataggctctgtggttctggttttcagtccattgtgaatggatgtcaggaaatttgtgttaaagaagctgaagttgttttatgtggaggaaccgaaagcatgagccaagctccctactgtgtcagaaatgtgcgttttggaaccaagcttggatcagatatcaagctggaagattctttatgggtatcattaacagatcagcatgtccagctccccatggcaatgactgcagagaatcttactgtaaaacacaaaataagcagagaagaatgtgacaaatatgccctgcagtcacagcagagatggaaagctgctaatgatgctggctactttaatgatgaaatggcaccaattgaagtgaagacaaagaaaggaaaacagacaatgcaggtagacgagcatgctcggccccaaaccaccctggaacagttacagaaacttcctccagtattcaagaaagatggaactgttactgcagggaatgcatcgggtgtagctgatggtgctggagctgttatcatagctagtgaagatgctgttaagaaacataacttcacaccactggcaagaattgtgggctactttgtatctggatgtgatccctctatcatgggtattggtcctgtccctgctatcagtggggcactgaagaaagcaggactgagtcttaaggacatggatttggtagaggtgaatgaagcttttgctccccagtacttggctgttgagaggagtttggatcttgacataagtaaaaccaatgtgaatggaggagccattgctttgggtcacccactgggaggatctggatcaagaattactgcacacctggttcacgaattaaggcgtcgaggtggaaaatatgccgttggatcagcttgcattggaggtggccaaggtattgctgtcatcattcagagcacagcctgaagagaccagtgagctcactgtgacccatccttactctacttggccaggccacagtaaaacaagtgaccttcagagcagctgccacaactggccatgccctgccattgaaacagtgattaagtttgatcaagccatggtgacacaaaaatgcattgatcatgaataggagcccatgctagaagtacattctctcagatttgaaccagtggaatatgatgtatttctgagctaaaactcaactatagaagacattaaaagaaatcgtattcttgccaagtaaccaccacttctgccttagataatatgattataaggaaatcaaataaatgttgccttaacttc

SEQ ID NO: 160 - protein, 397 aa, Homo sapiens; identical to SEQ ID NO: 30

SEQ ID NO: 161 - DNA, 1584 bp, Homo sapiens
  CDS (49)..(1239)
gcgtcccccacaccacagacccgcgccgccgacgacccagcagccgccatgcgtctgctccgaggtgtgtttgtagttgctgctaagcgaacgccctttggagcttacggaggccttctgaaagacttcactgctactgacttgtctgaatttgctgccaaggctgccttgtctgctggcaaagtctcacctgaaacagttgacagtgtgattatgggcaatgtcctgcagagttcttcagatgctatatatttggcaaggcatgttggtttgcgtgtgggaatcccaaaggagaccccagctctcacgattaataggctctgtggttctggttttcagtccattgtgaatggatgtcaggaaatttgtgttaaagaagctgaagttgttttatgtggaggaaccgaaagcatgagccaagctccctactgtgtcagaaatgtgcgttttggaaccaagcttggatcagatatcaagctggaagattctttatgggtatcattaacagatcagcatgtccagctccccatggcaatgactgcagagaatcttactgtaaaacacaaaataagcagagaagaatgtgacaaatatgccctgcagtcacagcagagatggaaagctgctaatgatgctggctactttaatgatgaaatggcaccaattgaagtgaagacaaagaaaggaaaacagacaatgcaggtagacgagcatgctcggccccaaaccaccctggaacagttacagaaacttcctccagtattcaagaaagatggaactgttactgcagggaatgcatcgggtgtagctgatggtgctggagctgttatcatagctagtgaagatgctgttaagaaacataacttcacaccactggcaagaattgtgggctactttgtatctggatgtgatccctctatcatgggtattggtcctgtccctgctatcagtggggcactgaagaaagcaggactgagtcttaaggacatggatttggtagaggtgaatgaagcttttgctccccagtacttggctgttgagaggagtttggatcttgacataagtaaaaccaatgtgaatggaggagccattgctttgggtcacccactgggaggatctggatcaagaattactgcacacctggttcacgaattaaggcgtcgaggtggaaaatatgccgttggatcagcttgcattggaggtggccaaggtattgctgtcatcattcagagcacagcctgaagagaccagtgagctcactgtgacccatccttactctacttggccaggccacagtaaaacaagtgaccttcagagcagctgccacaactggccatgccctgccattgaaacagtgattaagtttgatcaagccatggtgacacaaaaatgcattgatcatgaataggagcccatgctagaagtacattctctcagatttgaaccagtgaaatatgatgtatttttgagctaaaactcaactatagaagacattaaaagaaatcgtattcttgccaagtaaccaccacttctgccttagataatatgattataaggaaatcaaataaatgttgccttaacttc

SEQ ID NO: 162 - protein, 397 aa, Homo sapiens; identical to SEQ ID NO: 30

SEQ ID NO: 163 - DNA, 1584 bp, Homo sapiens
  CDS (49)..(1239)
gcgtcccccacaccacagacccgcgccgccgacgacccagcagccgccatgcgtctgctccgaggtgtgtttgtagttgctgctaagcgaacgccctttggagcttacggaggccttctgaaagacttcactgctactgacttgtctgaatttgctgccaaggctgccttgtctgctggcaaagtctcacctgaaacagttgacagtgtgattatgggcaatgtcctgcagagttcttcagatgctatatatttggcaaggcatgttggtttgcgtgtgggaatcccaaaggagaccccagctctcacgattaataggctctgtggttctggttttcagtccattgtgaatggatgtcaggaaatttgtgttaaagaagctgaagttgttttatgtggaggaaccgaaagcatgagccaagctccctactgtgtcagaaatgtgcgttttggaaccaagcttggatcagatatcaagctggaagattctttatgggtatcattaacagatcagcatgtccagctccccatggcaatgactgcagagaatcttactgtaaaacacaaaataagcagagaagaatgtgacaaatatgccctgcagtcacagcagagatggaaagctgctaatgatgctggctactttaatgatgaaatggcaccaattgaagtgaagacaaagaaaggaaaacagacaatgcaggtagacgagcatgctcggccccaaaccaccctggaacagttacagaaacttcctccagtattcaagaaagatggaactgttactgcagggaatgcatcgggtgtagctgatggtgctggagctgttatcatagctagtgaagatgctgttaagaaacataacttcacaccactggcaagaattgtgggctactttgtatctggatgtgatccctctatcatgggtattggtcctgtccctgctatcagtggggcactgaagaaagcaggactgagtcttaaggacatggatttggtagaggtgaatgaagcttttgctccccagtacttggctgttgagaggagtttggatcttgacataagtaaaaccaatgtgaatggaggagccattgctttgggtcacccactgggaggatctggatcaagaattactgcacacctggttcacgaattaaggcgtcgaggtggaaaatatgccgttggatcagcttgcattggaggtggccaaggtattgctgtcatcattcagagcacagcctgaagagaccagtgagctcactgtgacccatccttactctacttggccaggccacagtaaaacaagtgaccttcagagcagctgccacaactggccatgccctgccattgaaacagtgattaagtttgatcaagccatggtgacacaaaaatgcattgatcatgaataggagcccatgctagaagtacattctctcagatttgaaccagtgaaatatgatgtatttctgagctaaaactcaactatagaagacattaaaagaaatcgtattcttgccaagtaacccccacttctgccttagataatatgattataaggaaatcaaataaatgttgccttaacttc

SEQ ID NO: 164 - protein, 397 aa, Homo sapiens; identical to SEQ ID NO: 30

SEQ ID NO: 165 - DNA, 1584 bp, Homo sapiens
  CDS (49)..(1239)
gcgtcccccacaccacagacccgcgccgccgacgacccagcagccgccatgcgtctgctccgaggtgtgtttgtagttgctgctaagcgaacgccctttggagcttacggaggccttctgaaagacttcactgctactgacttgtctgaatttgctgccaaggctgccttgtctgctggcaaagtctcacctgaaacagttgacagtgtgattatgggcaatgtcctgcagagttcttcagatgctatatatttggcaaggcatgttggtttgcgtgtgggaatcccaaaggagaccccagctctcacgattaataggctctgtggttctggttttcagtccattgtgaatggatgtcaggaaatttgtgttaaagaagctgaagttgttttatgtggaggaaccgaaagcatgagccaagctccctactgtgtcagaaatgtgcgttttggaaccaagcttggatcagatatcaagctggaagattctttatgggtatcattaacagatcagcatgtccagctccccatggcaatgactgcagagaatcttactgtaaaacacaaaataagcagagaagaatgtgacaaatatgccctgcagtcacagcagagatggaaagctgctaatgatgctggctactttaatgatgaaatggcaccaattgaagtgaagacaaagaaaggaaaacagacaatgcaggtagacgagcatgctcggccccaaaccaccctggaacagttacagaaacttcctccagtattcaagaaagatggaactgttactgcagggaatgcatcgggtgtagctgatggtgctggagctgttatcatagctagtgaagatgctgttaagaaacataacttcacaccactggcaagaattgtgggctactttgtatctggatgtgatccctctatcatgggtattggtcctgtccctgctatcagtggggcactgaagaaagcaggactgagtcttaaggacatggatttggtagaggtgaatgaagcttttgctccccagtacttggctgttgagaggagtttggatcttgacataagtaaaaccaatgtgaatggaggagccattgctttgggtcacccactgggaggatctggatcaagaattactgcacacctggttcacgaattaaggcgtcgaggtggaaaatatgccgttggatcagcttgcattggaggtggccaaggtattgctgtcatcattcagagcacagcctgaagagaccagtgagctcactgtgacccatccttactctacttggccaggccacagtaaaacaagtgaccttcagagcagctgccacaactggccatgccctgccattgaaacagtgattaagtttgatcaagccatggtgacacaaaaatgcattgatcatgaataggagcccatgctagaagtacattctctcagatttgaaccagtgaaatatgatgtatttctgagctaaaactcaactatagaagacattaaaagaaatcgtattcttgccaagtaaccaccacttctgccttagataatatgactataaggaaatcaaataaatgttgccttaacttc

SEQ ID NO: 166 - protein, 397 aa, Homo sapiens; identical to SEQ ID NO: 30

SEQ ID NO: 167 - DNA, 1003 bp, Homo sapiens
  CDS (5)..(982)
cgccatgccgccctccatctcagctttccaggccgcctacatcggcatcgaggtgctcatcgccctggtctctgtgcccgggaacgtgctggtgatctgggcggtgaaggtgaaccaggcgctgcgggatgccaccttctgcttcatcgtgtcgctggcggtggctgatgtggccgtgggtgccctggtcatccccctcgccatcctcatcaacattgggccacagacctacttccacacctgcctcatggttgcctgtccggtcctcatcctcacccagagctccatcctggccctgctggcaattgcggtggaccgctacctccgggtcaagatccctctccggtacaagatggtggtgaccccccggagggcggcggtggccatagccggctgctggatcctctccttcgtggtgggactgacccctatgtttggctggaacaatctgagtgcggtggagcgggcctgggcagccaacggcagcatgggggagcccgtgatcaagtgcgagttcgagaaggtcatcagcatggagtacatggtctacttcaacttctttgtgtgggtgctgcccccgcttctcctcatggtcctcatctacctggaggtcttctacctaatccgcaagcagctcaacaagaaggtgtcggcctcctccggcgacccgcagaagtactatgggaaggagctgaagatcgccaagtcgctggcccccatcctcttcctctttgccctcagctggctgcctttgcacatcctcaactgcatcaccctcttctgcccgtcctgccacaagcccagcatccttacctacattgccatcttcctcacgcacggcaactcggccatgaaccccattgtctatgccttccgcatccagaagttccgcgtcaccttccttaagatttggaatgaccatttccgctgccagcctgcacctcccattgacgaggatctcccagaagagaggcctgatgactagaccccgccttccgctccc

SEQ ID NO: 168 - protein, 326 aa, Homo sapiens
MPPSISAFQAAYIGIEVLIALVSVPGNVLVIWAVKVNQALRDATFCFIVSLAVADVAVGALVIPLAILINIGPQTYFHTCLMVACPVLILTQSSILALLAIAVDRYLRVKIPLRYKMVVTPRRAAVAIAGCWILSFVVGLTPMFGWNNLSAVERAWAANGSMGEPVIKCEFEKVISMEYMVYFNFFVWVLPPLLLMVLIYLEVFYLIRKQLNKKVSASSGDPQKYYGKELKIAKSLAPILFLFALSWLPLHILNCITLFCPSCHKPSILTYIAIFLTHGNSAMNPIVYAFRIQKFRVTFLKIWNDHFRCQPAPPIDEDLPEERPDD

SEQ ID NO: 169 - DNA, 1041 bp, Homo sapiens
  CDS (15)..(989)
aaattccggccaagatggcagcaatgaggaaggcgcttccgcggcgactggtgggcttggcgtccctccgggctgtcagcacctcatctatgggcactttaccaaagcgggtgaaaattgtggaagttggtccccgagatggactacaaaatgaaaagaatatcgtatctactccagtgaaaatcaagctgatagacatgctttctgaagcaggactctctgttatagaaaccaccagctttgtgtctcctaagtgggttccccagatgggtgaccacactgaagtcttgaagggcattcagaagtttcctggcatcaactacccagtcctgaccccaaatttgaaaggcttcgaggcagcggttgctgctggagccaaggaagtagtcatctttggagctgcctcagagctcttcaccaagaagaacatcaattgttccatagaggagagttttcagaggtttgacgcaatcctgaaggcagcgcagtcagccaatatttctgtgcgggggtacgtctcctgtgctcttggctgcccttatgaagggaagatctccccagctaaagtagctgaggtcaccaagaagttctactcaatgggctgctacgagatctccctgggggacaccattggtgtgggcaccccagggatcatgaaagacatgctgtctgctgtcatgcaggaagtgcctctggctgccctggctgtccactgccatgacacttatggtcaagccctggccaacaccttgatggccctgcagatgggagtgagtgtcgtggactcttctgtggcaggacttggaggctgtccctacgcacagggggcatcaggaaacttggccacagaagacctggtctacatgctagagggcttgggcattcacacgggtgtgaatctccagaagcttctggaagctggaaactttatctgtcaagccctgaacagaaaaactagctccaaagtggctcaggctacctgtaaactctgagccccttgcccacctgaaggcctggggatgatgtggaaataaggggcat

SEQ ID NO: 170 - protein, 325 aa, Homo sapiens; identical to SEQ ID NO: 60

SEQ ID NO: 171 - DNA, 1215 bp, Mus musculus
aaggcaagaagaaatacctggccgcagccttccctagtgcctgtgggaagactaacttggccatgatgaaccccagcctgcccgggtggaaggtcgaatgtgtgggcgatgacattgcctggatgaagtttgatgcccaaggcaacttaagggctatcaacccagaaaacgggttttttggagttgctcctggcacctcagtgaagacaaatccaaatgccattaaaaccatccagaaaaacaccatcttcaccaacgtggccgagactagcgatgggggtgtttactgggaaggcatcgatgagccgctggccccgggagtcaccatcacctcctggaagaacaaggagtggagaccgcaggacgcggaaccatgtgcccatcccaactcgagattctgcacccctgccagccagtgccccattattgaccctgcctgggaatctccagaaggagtacccattgagggtatcatctttggtggccgtagacctgaaggtgtcccccttgtctatgaagccctcagctggcagcatggggtgtttgtaggagcagccatgagatctgaggccacagctgctgcagaacacaagggcaagatcatcatgcacgacccctttgccatgcgacccttcttcggctacaacttcggcaaatacctggcccactggctgagcatggcccaccgcccagcagccaagttgcccaagatcttccatgtcaactggttccggaaggacaaagatggcaagttcctctggccaggctttggcgagaactcccgggtgctggagtggatgttcgggcggattgaaggggaagacagcgccaagctcacgcccatcggctacatccctaaggaaaacgccttgaacctgaaaggcctggggggcgtcaacgtggaggagctgtttgggatctctaaggagttctgggagaaggaggtggaggagatcgacaggtatctggaggaccaggtcaacaccgacctcccttacgaaattgagagggagctccgagccctgaaacagagaatcagccagatgtaaatcccaatgggggcgtctcgagagtcaccccttcccactcacagcatcgctgagatctaggagaaagccagcctgctccagctttgagatagcggcacaatcgtgagtagatcagaaaagcaccttttaatagtcagttgagtagcacagagaacaggctaggggc

SEQ ID NO: 172 - DNA, 1068 bp, Mus musculus
ccatgcgacccttcttcggctacaacttcggcaaatacctggcccactggctgagcatggcccaccgcccagcagccaagttgcccaagatcttccatgtcaactggttccggaaggacaaagatggcaagttcctctggccaggctttggcgagaactcccgggtgctggagtggatgttcgggcggattgaaggggaagacagcgccaagctcacgcccatcggctacatccctaaggaaaacgccttgaacctgaaaggcctggggggcgtcaacgtggaggagctgtttgggatctctaaggagttctgggagaaggaggtggaggagatcgacaggtatctggaggaccaggtcaacaccgacctcccttacgaaattgagagggagctccgagccctgaaacagagaatcagccagatgtaaatcccaatgggggcgtctcgagagtcaccccttcccactcacagcatgcgctgagatctaggagaaagccagcctgctccagctttgagatagcggcacaatgctgagtagatcagaaaagcaccttttaatagtcagttgagtagcacagagaacaggctaggggcaaataagattgggaggggaaatcaccgcatagtctctgaagtttgcatttgacaccaatgggggttttggttccacttcaaggtcactcaggaatccagttcttcacgttagctgtagcagttagctaaaatgcacagaaaacatacttgagctgtatatatgtgtgtgaacgtgtctctgtgtgagcatgtgtgtgtgtgtgtgtgtgtgtgtgtgtgtgtgtgtgtgtgtacatgcctgtctgtcccattgtccacagtatatttaaaacctttggggaaaaatcttgggcaaatttgtagctgtaactagagagtcatgttgctttgttgctagtatgtatgtttaaattatttttatacaccgcccttccttacctttctttacataattgaaattggtatccggaccacttcttgggaaaaaaattacaaaataaacttttatagaaaaagtaaaaaaaaaaaaaaaa

SEQ ID NO: 173 - protein, 622 aa, Mus musculus
MPPQLHNGLDFSAKVIQGSLDSLPQAVRKFVEGNAQLCQPEYIHICDGSEEEYGQLLAHMQEEGVIRKLKKYDNCWLALTDPRDVARIESKTVIITQEQRDTVPIPKTGLSQLGRWMSEEDFEKAFNARFPGCMKGRTMYVIPFSMGPLGSPLAKIGIELTDSPYVVASMRIMTRMGISVLEALGDGEFIKCLHSVGCPLPLKKPLVNNWACNPELTLIAHLPDRREIISFGSGYGGNSLLGKKCFALRIASRLAKEEGWLAEHMLILGITNPEGKKKYLAAAFPSACGKTNLAMMNPSLPGWKVECVGDDIAWMKFDAQGNLRAINPENGFFGVAPGTSVKTNPNAIKTIQKNTIFTNVAETSDGGVYWEGIDEPLAPGVTITSWKNKEWRPQDAEPCAHPNSRFCTPASQCPIIDPAWESPEGVPIEGIIFGGRRPEGVPLVYEALSWQHGVFVGAAMRSEATAAAEHKGKIIMHDPFAMRPFFGYNFGKYLAHWLSMAHRPAAKLPKIFHVNWFRKDKDGKFLWPGFGENSRVLEWMFGRIEGEDSAKLTPIGYIPKENALNLKGLGGVNVEELFGISKEFWEKEVEEIDRYLEDQVNTDLPYEIERELRALKQRISQM

SEQ ID NO: 174 - protein, 622 aa, Rattus norvegicus
MPPQLHNGLDFSAKVIQGSLDSLPQEVRKFVEGNAQLCQPEYIHICDGSEEEYGRLLAHMQEEGVIRKLKKYDNCWLALTDPRDVARIESKTVIITQEQRDTVPIPKSGQSQLGRWMSEEDFEKAFNARFPGCMKGRTMYVIPFSMGPLGSPLAKIGIELTDSPYVVASMRIMTRMGTSVLEALGDGEFIKCLHSVGCPLPLKKPLVNNWACNPELTLIAHLPDRREIISFGSGYGGNSLLGKKCFALRIASRLAKEEGWLAEHMLILGITNPEGKKKYLAAAFPSACGKTNLAMMNPTLPGWKVECVGDDIAWMKFDAQGNLRAINPENGFFGVAPGTSVKTNPNAIKTIQKNTIFTNVAETSDGGVYWEGIDEPLAPGVTITSWKNKEWRPQDEEPCAHPNSRFCTPASQCPIIDPAWESPEGVPIEGIIFGGRRPAGVPLVYEALSWQHGVFVGAAMRSEATAAAEHKGKVIMHDPFAMRPFFGYNFGKYLAHWLSMAHRPAAKLPKIFHVNWFRKDKNGKFLWPGFGENSRVLEWMFGRIEGEDSAKLTPIGYVPKEDALNLKGLGDVNVEELFGISKEFWEKEVEEIDKYLEDQVNADLPYEIERELRALKQRISQM

SEQ ID NO: 175 - DNA, 22 bp, Artificial Sequence
  Description of Artifical Sequence:  Primer/Probe
gcagaacataaaggcaaaatca

SEQ ID NO: 176 - DNA, 23 bp, Artificial Sequence
  Description of Artifical Sequence:  Primer/Probe
tcatgcatgacccctttgccatg

SEQ ID NO: 177 - DNA, 22 bp, Artificial Sequence
  Description of Artifical Sequence:  Primer/Probe
caggtatttgccgaagttgtag

SEQ ID NO: 178 - DNA, 1347 bp, Mus musculus
acatcaaccgcctgggccagagcgacccagccccgctgcagcaccaggtggacatctaccagaagcgctgtgaggcctttggctggcacaccatcatcgtggacggacacagcgtggaggagctgtgcaaggcctttggtcaggccaagcaccaaccaacagccatcattgccaagaccttcaagggccgagggatcacagggattgaagacaaggaggcgtggcacgggaagcccctccccaaaaacatggccgagcagattatccaggagatttacagccaggttcagagcaaaaagaagatcctggccacgccccctcaggaggatgccccatccgtggacattgctaacatccgaatgcctacgccacccagctacaaagtgggggacaagatagccacccggaaggcctatggactggccctcgctaagctgggccacgccagtgaccgtatcattgccctggatggagacaccaagaattccaccttctcggagctcttcaaaaaggagcacccagaccggttcattgagtgctacattgccgagcaaaacatggtgagcattgccgtgggctgtgccacacgtgaccggacagtgcccttctgcagtactttcgcggccttcttcacacgggccttcgaccagattcgcatggccgccatctctgagagcaacatcaacctctgtggctcccactgtggtgtgtccattggggaagacgggccctctcagatggccctcgaagacctggccatgttccggtcagtccccatgtccaccgtcttttacccaagcgatggagttgcaacagagaaggcagtggagttagcagccaacacaaagggcatttgcttcatccggaccagccgcccagagaatgccattatttatagcaacaatgaggatttccaggtcggccaagccaaggtggtcctgaagagcaaggatgaccaagtgacagtgatcggggctggtgtaactctgcatgaggccttggctgctgcagagagtctaaagaaagataagatcagcatccgggtgctggatcccttcactatcaagcccctggacaggaaactcatcctagactctgcccgagcaaccaaaggcaggatcctcaccgtggaggaccactactacgaaggtggcataggagaggcagtgtctgctgccgtagtgggtgaacctggagtgacggtcactcgcctggctgtcagccaagtaccacgaagtggcaagccagctgagctactgaagatgttcggtattgacaaggacgccattgtgcaagctgtgaaaggccttgtcaccaagggctagggagggcatgggatgctgggtg

SEQ ID NO: 179 - protein, 623 aa, Mus musculus
MEGYHKPDQQKLQALKDTANRLRISSIQATTAAGSGHPTSCCSAAEIMAVLFFHTMRYKALDPRNPHNDRFVLSKGHAAPILYAVWAEAGFLPEAELLNLRKISSDLDGHPVPKQAFTDVATGSLGQGLGAACGMAYTGKYFDKASYRVYCMLGDGEVSEGSVWEAMAFAGIYKLDNLVAIFDINRLGQSDPAPLQHQVDIYQKRCEAFGWHTIIVDGHSVEELCKAFGQAKHQPTAIIAKTFKGRGITGIEDKEAWHGKPLPKNMAEQIIQEIYSQVQSKKKILATPPQEDAPSVDIANIRMPTPPSYKVGDKIATRKAYGLALAKLGHASDRIIALDGDTKNSTFSELFKKEHPDRFIECYIAEQNMVSIAVGCATRDRTVPFCSTFAAFFTRAFDQIRMAAISESNINLCGSHCGVSIGEDGPSQMALEDLAMFRSVPMSTVFYPSDGVATEKAVELAANTKGICFIRTSRPENAIIYSNNEDFQVGQAKVVLKSKDDQVTVIGAGVTLHEALAAAESLKKDKISIRVLDPFTIKPLDRKLILDSARATKGRILTVEDHYYEGGIGEAVSAAVVGEPGVTVTRLAVSQVPRSGKPAELLKMFGIDKDAIVQAVKGLVTKG

SEQ ID NO: 180 - DNA, 19 bp, Artificial Sequence
  Description of Artifical Sequence:  Primer/Probe
cctagggcgggtatgaagt

SEQ ID NO: 181 - DNA, 27 bp, Artificial Sequence
  Description of Artifical Sequence:  Primer/Probe
ccagaatctcaggaatgtatagacccc

SEQ ID NO: 182 - DNA, 24 bp, Artificial Sequence
  Description of Artifical Sequence:  Primer/Probe
tcagtacatctttgagcacctttc

SEQ ID NO: 183 - DNA, 1082 bp, Mus musculus
cacacagctcccatttcctggtgcctgagatcccagccatcagaaagtgatttgggtgagaattcacaacatatatgtcacctctgcatattgaagtgacatctaataaaacaaggacgtcctattttgtctgaacccgctgaatgaagctctgttatcctagttagtcattgggccgccatcctctgtacccgatagtgacacaaaacagatgtcggtgcctgtacaagaattctcagtgcctgttgtgacagactgtgcttagaagaaacattcgtgagccataaagcaggaaccacagatgaaagggccagttaaaagtccacctgctccaagtatcatagaaaacccaaaagcctgttgtataatctggtattgtccccatccccagatgctttgaaaactaggattctcagagcatggatacccacgcttccatcttcccacaaacatttcctagagttgtactggtgggtgcagccctaggtggttggttgggggaagtcttggaagctgtactttgattgcaggtcaagcaaagccaaatccagatatttctgtgtcactcaccagttgtccatgtccacccacaaaacaattgtattatagtcaagttgtcctagctgattggtcctcaaataaggatgcaactatgtttgcaacccagttaggacacatttgaaagaacctgactcactagcatctaaacaatatcatttccccaatgcttggtggcacttcagacttttgttctcctggttgatcaaggtgttgcctggtggtgccgcctcctagtgtgaatatttcagttaagtgtgggtctgagcatgaccgggctgggcttagctcactgctacttggaaaatgactggcattctgcttcctaggccctaaacccatattcagagggaaaattcactatcaagcctcacagcgaaatcacagcagtgttggaattcttattttcaagtgcttatctcacaacattgaaaaatatttttggtgtattaagatttaaaataaagtcatcataaacttttgaatttaaaaaaaaaaaaaaaaaaaaaaaaaaaaaaaaaaaa

SEQ ID NO: 184 - protein, 267 aa, Mus musculus
MNMSVLTLQEYEFEKQFNENEAIQWMQENWKKSFLFSALYAAFIFGGRHLMNKRAKFELRKPLVLWSLTLAVFSIFGALRTGAYMLYILMTKGLKQSVCDQSFYNGPVSKFWAYAFVLSKAPELGDTIFIILRKQKLIFLHWYHHITVLLYSWYSYKDMVAGGGWFMTMNYGVHAVMYSYYALRAAGFRVSRKFAMFITLSQITQMLMGCVINYLVFNWMQHDNDQCYSHFQNIFWSSLMYLSYLVLFCHFFFEAYIGKVKKATKAE

SEQ ID NO: 185 - protein, 267 aa, Rattus norvegicus
MNMSVLTLQEYEFEKQFNENEAIQWMQENWKKSFLFSALYAAFIFGGRHLMNKRAKFELRKPLVLWSLTLAVFSIFGALRTGAYMLYILMTKGLKQSVCDQSFYNGPVSKFWAYAFVLSKAPELGDTIFIILRKQKLIFLHWYHHITVLLYSWYSYKDMVAGGGWFMTMNYGVHAVMYSYYALRAAGFRVSRKFAMFITLSQITQMLMGCVINYLVFNWMQHDNDQCYSHFQNIFWSSLMYLSYLLLFCHFFFEAYIGKVKKATKAE

SEQ ID NO: 186 - DNA, 20 bp, Artificial Sequence
  Description of Artifical Sequence:  Primer/Probe
caatggatgcaggaaaactg

SEQ ID NO: 187 - DNA, 26 bp, Artificial Sequence
  Description of Artifical Sequence:  Primer/Probe
tttcctgttttctgctctgtatgctg

SEQ ID NO: 188 - DNA, 20 bp, Artificial Sequence
  Description of Artifical Sequence:  Primer/Probe
ccgaccaccgaatataaagg

SEQ ID NO: 189 - DNA, 1494 bp, Mus musculus
agagccccgcggaatagctgagcttcgccatggccctgctacgaggtgtgttcatcgtcgctgcgaagagacaccctttggagcttacgggggccttctcaaggacttctctgccaccgatttaactgaatttgctgccagggctgctctgtctgctggcaaagttccacctgaaaccatcgatagtgtcatcgtgggcaatgtcatgcagagctcttcagatgcggcatacctggcgaggcatgtgggtttgcgagtgggagtcccaacagagactggggcccttaccctcaacaggctctgtggctctggtttccagtccatcgtgagcggatgtcaggaaatctgttctaaagatgctgaggtcgtcttgtgtggaggaacagagagcatgagccagtccccctactgtgtcagaaatgtgcgcttcggaaccaaatttggattagatctcaagctggaagatactttgtgggcaggattaacggatcaacatgttaagctgcccatgggaatgactgcagagaaccttgctgcaaaatacaacataagcagagaagactgtgacagatacgccttgcagtctcagcagaggtggaaagctgctaacgaggctggctacttcaatgaggagatggcacccattgaggtgaagacgaagaaaggcaaacagaccatgcaagtggacgagcacgctcgaccccaaaccaccctggagcaactgcagaagctcccgtccgtgttcaagaaagacgggacagtcacagcagggaacgcctcgggggtgtctgacggtgctggggccgtcatcatagccagcgaagatgctgtcaaaaaacataacttcacgcccctggccagagtcgtgggctacttcgtgtccggatgcgatcctactatcatgggtattggtccagtccctgctatcaatggagcattgaagaaagctgggctgagtcttaaggacatggatttgatagacgtgaacgaagcttttgcccctcagttcttgtctgttcagaaggccctggatcttgaccccagcaaaaccaatgtgagtggaggcgccattgccctgggtcacccgctgggaggatctggctccagaatcaccgcacacctggttcatgagttaaggcgtcgaggtggaaagtacgcagtgggatcagcttgcattggaggtggccaaggcatcgccttgatcatccagaacacagcctgaaggcatcacaagcacactgcccacacttactgggccaggccacggaacacaggagaccttcgagtcagccctgctgagacagtgattgtatgtgaccaagccttgatgaggcaagatgcattgggttctgtctacttcatacctgtctgacgtgttagaataaaaacaccaaccatcggaggccttaagagaaatggtatctgtcagtagtcaccactgtatgccttccatggagtaatacaaactgaataaatgttgccttaactccagct

SEQ ID NO: 190 - DNA, 1315 bp, Rattus norvegicus
gtcatggcgctgctacgaggtgtgtttatcgttgctgcgaagcgaacaccctttggagcttatgggggtcttctcaaggacttcactgccactgacttaactgaatttgctgccagggctgccctgtctgctggcaaagttccaccggaaaccatcgatagtgtcatcgtgggcaatgtcatgcagagctcttcagatgcggcgtacctggcaaggcatgtgggtttacgtgtgggagtcccgacggagactggggccctcaccctcaacagactctgtggctctggtttccagtccatcgtgagcggatgtcaggaaatctgctcgaaagacgctgaggtcgtcttatgtggaggaaccgagagcatgagccagtccccctactctgtcagaaatgtgcgcttcggaaccaaatttgggttagatctcaagctggaagatactttgtgggcaggattaacggatcaacacgtgaagctccccatggggatgactgcagagaacctggctgcaaaatacaacataagcagagaagactgcgacagatacgccctgcagtcccagcagaggtggaaagccgctaacgaggctggctactttaatgaggagatggcccccattgaggtgaagaccaagaagggcaaacagaccatgcaagtggatgagcacgcccggccccaaacgaccctggagcagctgcagaacctcccgccagtgttcaagaaagaggggacggtcacagcagggaacgcctcgggcatgtctgacggtgctggggtcgtcatcatagccagcgaagatgctgtcaaaaaacataacttcacaccactggccagagtcgtgggctactttgtgtctggatgtgaccctgctatcatggggatcggtccagtccctgccatcactggagcattgaagaaagctgggctgagccttaaggacatggatttgatagacgtgaatgaagcatttgctcctcagttcttggctgttcagaagagcttggatctcgaccccagtaaaaccaacgtgagtggaggtgccatagccctgggtcacccgctgggaggatctggatccagaatcaccgcacacctggttcacgagttaaggcgtcgaggtggaaaatacgcagtgggatcagcttgcattggaggtggccaaggcatctccctgatcatccagaacacagcctgaagggattgcaagcatcctacccaccctcacttggccaggctacggaacacaggcgacctttgagtcagccctgctgtgacagtaaatgcatttgaccaagccttgatgggttctgtct

SEQ ID NO: 191 - DNA, 799 bp, Mus musculus
ttttttttttggagttaaggcaacatttattcagtttgtattactccatggaaggcatacagtggtgactactgacagataccatttctcttaaggcctccgatggttggtgtttttattctaacacgtcagacaggtatgaagtagacagaacccaatgcatcttgcctcatcaaggcttggtcacatacaatcactgtctcagcagggctgactcgaaggtctcctgtgttccgtggcctggcccagtaagtgtgggcagtgtgcttgtgatgccttcaggctgtgttctggatgatcaaggcgatgccttggccaccttccatgcaagctgattccactgggtactttccaccttgacgccttaactcatgaaccaggtgtgcggtgattctggagccagatcctcccagcgggtgacccagggcaatggcgcctccactcacattggttttgctggggtcaagatccagggccttctgaacagacaagaactgaggggcaaaagcttcgttcacgtctatcaaatccatgtccttaagactcagcccagctttcttcaatgctccattgatagcaaggacctgaccaatacccatgatagtaggatcgcatccggacacgaagtagcccacgactctggccaagggccgtgacgtttatgttttgacagcatccttgctgggcttgatgagggccccagcacgtcagacacccccgaggcgtatccttgtttgactgtcccgttttttttaaacactgaggggagctcttgcagtagctccagggtggatttgga

SEQ ID NO: 192 - protein, 397 aa, Rattus norvegicus
MALLRGVFIVAAKRTPFGAYGGLLKDFTATDLTEFAARAALSAGKVPPETIDSVIVGNVMQSSSDAAYLARHVGLRVGVPTETGALTLNRLCGSGFQSIVSGCQEICSKDAEVVLCGGTESMSQSPYSVRNVRFGTKFGLDLKLEDTLWAGLTDQHVKLPMGMTAENLAAKYNISREDCDRYALQSQQRWKAANEAGYFNEEMAPIEVKTKKGKQTMQVDEHARPQTTLEQLQNLPPVFKKEGTVTAGNASGMSDGAGVVIIASEDAVKKHNFTPLARVVGYFVSGCDPAIMGIGPVPAITGALKKAGLSLKDMDLIDVNEAFAPQFLAVQKSLDLDPSKTNVSGGAIALGHPLGGSGSRITAHLVHELRRRGGKYAVGSACIGGGQGISLIIQNTA

SEQ ID NO: 193 - protein, 397 aa, Mus musculus
MALLRGVFIVAAKRTPFGAYGGLLKDFSATDLTEFAARAALSAGKVPPETIDSVIVGNVMQSSSDAAYLARHVGLRVGVPTETGALTLNRLCGSGFQSIVSGCQEICSKDAEVVLCGGTESMSQSPYCVRNVRFGTKFGLDLKLEDTLWAGLTDQHVKLPMGMTAENLAAKYNISREDCDRYALQSQQRWKAANEAGYFNEEMAPIEVKTKKGKQTMQVDEHARPQTTLEQLQKLPSVFKKDGTVTAGNASGVSDGAGAVIIASEDAVKKHNFTPLARVVGYFVSGCDPTIMGIGPVPAINGALKKAGLSLKDMDLIDVNEAFAPQFLSVQKALDLDPSKTNVSGGAIALGHPLGGSGSRITAHLVHELRRRGGKYAVGSACIGGGQGIALIIQNTV

SEQ ID NO: 194 - DNA, 29 bp, Artificial Sequence
  Description of Artifical Sequence:  Primer/Probe
tactgtaaaacacaaaataagcagagaag

SEQ ID NO: 195 - DNA, 26 bp, Artificial Sequence
  Description of Artifical Sequence:  Primer/Probe
aatatgccctgcagtcacagcagaga

SEQ ID NO: 196 - DNA, 26 bp, Artificial Sequence
  Description of Artifical Sequence:  Primer/Probe
atcattaaagtagccagcatcattag

SEQ ID NO: 197 - protein, 253 aa, Homo sapiens
AAYKLVLIRHGESAWNLENRFSGWYDADLSPAGHEEAKRGGQALRDAGYEFDICFTSVQKRAIRTLWTVLDAIDQMWLPVVRTWRLNERHYGGLTGLNKAETAAKHGEAQVKIWRRSYDVPPPPMEPDHPFYSNISKDRRYADLTEDQLPSCESLKDTIARALPFWNEEIVPQIKEGKRVLIAAHGNSLRGIVKHLEGLSEEAIMELNLPTGIPIVYELDKNLKPIKPMQFLGDEETVRKAMEAVAAQGKAKK

SEQ ID NO: 198 - DNA, 356 bp, Mus musculus
aggcgacgcggcgggcaggcgttgcgagatgctggctatgaatttgacatctgcttcacctctgtgcagaagagagcaatccggaccctctggacagtcctggatgccattgaccagatgtggttgccagtggtcaggacttggcgcctcaatgagcgacactatggcggtctgacaggtctcaacaaagcagaaactgctgctaagcaatggtgaggcccaggtaaagatctggaaacgatcttatgatgtcccaccggctcccattggaccctgattaaccctttctacagcaacattcagcaaggaatcgcaggtacgcagaaccttactgaaagacccgcttcccctcctgt

SEQ ID NO: 199 - protein, 253 aa, Rattus norvegicus
MATHRLVMVRHGESSWNQENRFCGWFDAELSEKGAEEAKRGATAIKDAKIEFDICYTSVLKRAIRTLWTILDVTDQMWVPVVRTWRLNERHYGGLTGLNKAETAAKHGEEQVKIWRRSFDTPPPPMDEKHNYYASISKDRRYAGLKPEELPTCESLKDTIARALPFWNEEIAPKIKAGKRVLIAAHGNSLRGIVKHLEGMSDQAIMELNLPTGIPIVYELNQELKPTKPMRFLGDEETVRKAMEAVAAQGKAK

SEQ ID NO: 200 - protein, 253 aa, Mus musculus
MTTHRLVMVRHGESLWNQENRFCGWFDAELSEKGAEEAKRGATAIKDAKIEFDICYTSVLKRAIRTLWTILDVTDQMWVPVVRTWRLNERHYGGLTGLNKAETAAKHGEEQVKIWRRSFDTPPPPMDEKHNYYTSISKDRRYAGLKPEELPTCESLKDTIARALPFWNEEIAPKIKAGQRVLIAAHGNSLRGIVKHLEGMSDQAIMELNLPTGIPIVYELDQNLKPTKPMRFLGDEETVRKAMEAVAAQGKAK

SEQ ID NO: 201 - DNA, 22 bp, Artificial Sequence
  Description of Artifical Sequence:  Primer/Probe
ctacgagatgctggctatgagt

SEQ ID NO: 202 - DNA, 26 bp, Artificial Sequence
  Description of Artifical Sequence:  Primer/Probe
ttgacatctgcttcacctcagtgcag

SEQ ID NO: 203 - DNA, 22 bp, Artificial Sequence
  Description of Artifical Sequence:  Primer/Probe
gatcaatggcatctagcactgt

SEQ ID NO: 204 - DNA, 20 bp, Artificial Sequence
  Description of Artifical Sequence:  Primer/Probe
ggaggagcaggtgaagatct

SEQ ID NO: 205 - DNA, 26 bp, Artificial Sequence
  Description of Artifical Sequence:  Primer/Probe
cgatggacgagaagcacccctactac

SEQ ID NO: 206 - DNA, 17 bp, Artificial Sequence
  Description of Artifical Sequence:  Primer/Probe
ccgacgctccttgctaa

SEQ ID NO: 207 - DNA, 1335 bp, Rattus norvegicus
gccaagtcgctggccctcatcctcttcctctttgccctcagctggctgccgctgcatatcttgaactgtatcaccctcttctgccccacctgccagaaacccagcattctgatctacatcgccatcttcctcacacacggcaactccgccatgaaccccatcgtctatgccttccggatccacaagttccgggtcacctttctgaagatttggaatgaccacttccgatgccagcctaagcctcccatcgatgaagacctcccagaggagaaagctgaggactagactctgccttgctccgtctagcccatgcccagcggctctctgttcaactcccacgtcctccctgtcccaccctgtcccactgtccctcctcagttttcccagctggggtgtaggctgtggcatagcgcgcatcttttcttaaagcttttactttgagacgtcatggaaaacttaagaggtacacatggagaagacatgatcacagaagggaaacagcatagaagcatcgatgcctgcagctagtgctggagctggagctggagttgagtttgacatgatacagggactgcaggaatgaactagtattcctctccttcttcctcaccctcaccctccacagaatccacaccaacctcctcataatccttctctagggcagccatgtcctcacgggcctcagagaactctccctcctccatgccctcacccacgtaccagtgcacaaaggcacgcttggcatacatcagatcaaacttgtgatccaggcgagcccaagcctcagcaatggctgtggtgttgctcagcatacacacagctctctggaccttggccaggtcgccaccaggtaccacagtgggaggctggtaattaatgccaaccttgaagccagtggggcaccagtccacaaactggatggtacgcttggtcttgatggtggcaatggcagcattgacatctttggggaccacatcaccacggtacagcaggcagcaagccatgtatttaccatggcgagggtcacatttcaccatctggttggctggctcaaagcaggcattggtgatctctgctacagaaagctgttcatggtaggctttctcagcagagatgacaggggcataagtggccagagggaagtggatgcgagggtagggcaccaggttggtctggaattctgtcagatcaacattcagggccccatcaaatctgagggaagcagtgatggaagacacaatctggctaataaggcggttaaggttagtgtaggttgggcgctcaatgtcgaggtttctacgacagatgtcatagatggcctcattgtctaccatg

SEQ ID NO: 208 - DNA, 884 bp, Rattus norvegicus
cctcctccatgccctcacccacgtaccagtgcacaaaggcacgcttggcatacatcagatcaaacttgtgatccaggcgagcccaagcctcagcaatggctgtggtgttgctcagcatacacacagctctctggaccttggccaggtcgccaccaggtaccacagtgggaggctggtaattaatgccaaccttgaagccagtggggcaccagtccacaaactggatggtacgcttggtcttgatggtggcaatggcagcattgacatctttggggaccacatcaccacggtacagcaggcagcaagccatgtatttaccatggcgagggtcacatttcaccatctggttggctggctcaaagcaggcattggtgatctctgctacagaaagctgttcatggtaggctttctcagcagagatgacaggggcataagtggccagagggaagtggatgcgagggtagggcaccaggttggtctggaattctgtcagatcaacattcagggccccatcaaatctgagggaagcagtgatggaagacacaatctggctaataaggcggttaaggttagtgtaggttgggcgctcaatgtcgaggtttctacgacagatgtcatagatggcctcattgtctaccatgaaggcacaatcagagtgctccagggtggtgtgggtggtgaggatggaattgtagggctcaaccacagcagtggaaacctggggggctgggtaaatggagaactccagcttggacttctttccgtagtcgacagagagcctctccatcagcagggaggtgaacccagagccagttcccccaccaaagctgtggaaaaccaagaagccctggagacccgtgcactggtcagccagcttgcgaatt

SEQ ID NO: 209 - protein, 326 aa, Rattus norvegicus
MPPYISAFQAAYIGIEVLIALVSVPGNVLVIWAVKVNQALRDATFCFIVSLAVADVAVGALVIPLAILINIGPQTYFHTCLMVACPVLILTQSSILALLAIAVDRYLRVKIPLRYKTVVTQRRAAVAIAGCWILSLVVGLTPMFGWNNLSVVEQDWRANGSVGEPVIKCEFEKVISMEYMVYFNFFVWVLPPLLLMVLIYLEVFYLIRKQLNKKVSASSGDPQKYYGKELKIAKSLALILFLFALSWLPLHILNCITLFCPTCQKPSILIYIAIFLTHGNSAMNPIVYAFRIHKFRVTFLKIWNDHFRCQPKPPIDEDLPEEKAED

SEQ ID NO: 210 - DNA, 19 bp, Artificial Sequence
  Description of Artifical Sequence:  Primer/Probe
ccaccgcactcagattgtt

SEQ ID NO: 211 - DNA, 25 bp, Artificial Sequence
  Description of Artifical Sequence:  Primer/Probe
agccaaacataggggtcagtcccac

SEQ ID NO: 212 - DNA, 17 bp, Artificial Sequence
  Description of Artifical Sequence:  Primer/Probe
atagccggctgctggat

SEQ ID NO: 213 - DNA, 1260 bp, Rattus norvegicus
ggcccccgagatggtctgcagaatgaaaagagtatcgtgccgacgccagtgaaaatcaaactgatagacatgctatccgaagcagggctcccggtcatcgaggccaccagctttgtctctcccaagtgggtgccgcagatggctgaccactctgacgtcttgaagggcattcagaagtttcccggcatcaactacccggtcctgacaccaaacatgaaaggctttgaggaagcggtagctgcaggtgccaaggaagtgagcatctttggggctgcgtccgagctcttcacccggaagaatgtgaactgctctatagaggagagtttccagcgctttgatggggtcatgcaggccgcgagggctgccagcatctctgtgagagggtatgtctcctgtgccctcggatgtccctacgaggggaaggtctccccggctaaagttgctgaggtcgccaagaagttgtactcaatgggctgctatgagatctcccttggggacaccattggcgtaggcacgccaggactcatgaaagacatgctgactgctgtcctgcatgaagtgcctgtggccgcattggctgtccactgccatgacacctatggccaagctctggccaacacgttggtggccctgcagatgggagtgagcgttgtggactcctcggtggcaggactcggaggctgtccctatgcaaagggggcgtcaggaaacttggctaccgaggacctggtctacatgctgactggcttagggattcacacgggtgtgaacctccagaagctcctagaagccggggacttcatctgtcaagccctgaacagaaaaaccagttccaaagtggcacaggccacctgcaaactctgagccccttgttcacctaaaccggaactgtgggagttgggtgtacacaatgattcctggatggggaaatggaatgaaggcaaatgagccggcctcacagaggtccctctcctacatagaagggctagagctgccagcacgcccggaccagctccccagagctgcgtgcctaagcactgcttggctggccctgggtgagtccactagccagcagagctgacatccatgtgccacgaccgcgggtcccatgttctacctctgaggacagcagcgcctttgctgaaatggtgggctcaatctactgcggtggccgactgccaactccagcgtctctgggaaatctctgtacgtgattcttgaaaacagcttatgtaattaaaggtttaattttctaatatc

SEQ ID NO: 214 - DNA, 1009 bp, Rattus norvegicus
ggcccccgagatggtctgcagaatgaaaagagtatcgtgccgacgccagtgaaaatcaaactgatagacatgctatccgaagcagggctcccggtcatcgaggccaccagctttgtctctcccaagtgggtgccgcagatggctgaccactctgacgtcttgaagggcattcagaagtttcccggcatcaactacccggtcctgacaccaaacatgaaaggctttgaggaagcggtagctgcaggtgccaaggaagtgagcatctttggggctgcgtccgagctcttcacccggaagaatgtgaactgctctatagaggagagtttccagcgctttgatggggtcatgcaggccgcgagggctgccagcatctctgtgagagggtatgtctcctgtgccctcggatgtccctacgaggggaaggtctccccggctaaagttgctgaggtcgccaagaagttgtactcaatgggctgctatgagatctcccttggggacaccattggcgtaggcacgccaggactcatgaaagacatgctgactgctgtcctgcatgaagtgcctgtggccgcattggctgtccactgccatgacacctatggccaagctctggccaacacgttggtggccctgcagatgggagtgagcgttgtggactcctcggtggcaggactcggaggctgtccctatgcaaagggggcgtcaggaaacttggctaccgaggacctggtctacatgctgactggcttagggattcacacgggtgtgaacctccagaagctcctagaagccggggacttcatctgtcaagccctgaacagaaaaaccagttccaaagtggcacaggccacctgcaaactctgagccccttgttcacctaaaccggaactgtgggagttgggtgtacacaatgattcctggatggggaaatggaatgaaggcaaatgagccggcctcacagaggtccctctcctacatagaagggctagagctgccagcacgcccggac

SEQ ID NO: 215 - protein, 325 aa, Homo sapiens; identical to SEQ ID NO: 60

SEQ ID NO: 216 - protein, 325 aa, Mus musculus
MASVRKAFPRRLVGLTSLRAVSTSSMGTLPKQVKIVEVGPRDGLQNEKSIVPTPVKIRLIDMLSEAGLPVIEATSFVSPNWVPQMADHSDVLKGIQKFPGINYPVLTPNMKGFEEAVAAGAKEVSVFGAVSELFTRKNANCSIEESFQRFAGVMQAAQAASISVRGYVSCALGCPYEGKVSPAKVAEVAKKLYSMGCYEISLGDTIGVGTPGLMKDMLTAVMHEVPVTALGVHCHDTIGQALANTLVALQMGVSVVDSSVAGLGGCPYAKGASGNLATEDLVYMLNGLGIHTGVNLQKLLEAGDFICQALNRKTSSKVAQATCKL

SEQ ID NO: 217 - protein, 330 aa, Rattus norvegicus
RLRAKMATVRKAFPQRLVGLASLRAASTSSMGTLPKRVKIVEVGPRDGLQNEKSIVPTPVKIKLIDMLSEAGLPVIEATSFVSPKWVPQMADHSDVLKGIQKFPGINYPVLTPNMKGFEEAVAAGAKEVSIFGAASELFTRKNVNCSIEESFQRFDGVMQAARAASISVRGYVSCALGCPYEGKVSPAKVAEVAKKLYSMGCYEISLGDTIGVGTPGLMKDMLTAVLHEVPVAALAVHCHDTYGQALANTLVALQMGVSVVDSSVAGLGGCPYAKGASGNLATEDLVYMLTGLGIHTGVNLQKLLEAGDFICQALNRKTSSKVAQATCKL

SEQ ID NO: 218 - DNA, 25 bp, Artificial Sequence
  Description of Artifical Sequence:  Primer/Probe
aagctggtggtttctataacagaga

SEQ ID NO: 219 - DNA, 28 bp, Artificial Sequence
  Description of Artifical Sequence:  Primer/Probe
tcctgcttcagaaagcatgtctatcagc

SEQ ID NO: 220 - DNA, 29 bp, Artificial Sequence
  Description of Artifical Sequence:  Primer/Probe
aagaatatcgtatctactccagtgaaaat

SEQ ID NO: 221 - protein, 1047 aa, Homo sapiens
MRSEALLLYFTLLHFAGAGFPEDSEPISISHCNYTKQYPVFVGHKPGRNTTQRHRLDIQMIMIMNGTLYIAARDHIYTVDIDTSHTEEIYCSKKLTWKSRQADVDTCRMKGKHKDECHNFIKVLLKKNDDALFVCGTNAFNPSCRNYKMDTLEPFGDEFSGMARCPYDAKHANVALFADGKLYSATVTDFLAIDAVIYRSLGESPTLRTVKHDSKWLKEPYFVQAVDYGDYIYFFFREIAVEYNTMGKVVFPRVAQVCKNDMGGSQRVLEKQWTSFLKARLNCSVPGDSHFYFNILQAVTDVIRINGRDVVLATFSTPYNSIPGSAVCAYDMLDIASVFTGRFKEQKSPDSTWTPVPDERVPKPRPGCCAGSSSLERYATSNEFPDDTLNFIKTHPLMDEAVPSIFNRPWFLRTMVRYRLTKIAVDTAAGPYQNHTVVFLGSEKGIILKFLARIGNSGFLNDSLFLEEMSVYNSEKCSYDGVEDKRIMGMQLDRASSSLYVAFSTCVIKVPLGRCERHGKCKKTCIASRDPYCGWIKEGGACSHLSPNSRLTFEQDIERGNTDGLGDCHNSFVALNDISTPLPDNEMSYNTVYGHSSSLLPSTTTSDSTAQEGYESRGGMLDWKHLLDSPDSTDPLGAVSSHNHQDKKGVIRESYLKGHDQLVPVTLLAIAVILAFVMGAVFSGITVYCVCDHRRKDVAVVQRKEKELTHSRRGSMSSVTKLSGLFGDTQSKDPKPEAILTPLMHNGKLATPGNTAKMLIKADQHHLDLTALPTPESTPTLQQKRKPSRGSREWERNQNLINACTKDMPPMGSPVIPTDLPLRASPSHIPSVVVLPITQQGYQHEYVDQPKMSEVAQMALEDQAATLEYKTIKEHLSSKSPNHGVNLVENLDSLPPKVPQREASLGPPGASLSQTGLSKRLEMHHSSSYGVDYKRSYPTNSLTRSHQATTLKRNNTNSSNSSHLSRNQSFGRGDNPPPAPQRVDSIQVHSSQPSGQAVTVSRQPSLNAYNSLTRSGLKRTPSLKPDVPPKPSFAPLSTSMKPNDACT

1. An isolated nucleic acid molecule comprising a nucleic acid sequence selected from the group consisting of SEQ ID NO:2n-1, wherein n is an integer between 1 and 85.

2. An isolated nucleic acid molecule comprising a nucleic acid sequence encoding an amino acid sequence selected from the group consisting of SEQ ID NO:2n, wherein n is an integer between 1 and 85.

3. An isolated polypeptide comprising an amino acid sequence selected from the group consisting of SEQ ID NO:2n, wherein n is an integer between 1 and 85.

4. An isolated polypeptide of claim 3, wherein the isolated polypeptide comprises an amino acid sequence selected from the group consisting of SEQ ID NO:2, SEQ ID NO:4, SEQ ID NO:6, SEQ ID NO:86, SEQ ID NO:88, SEQ ID NO:90, SEQ ID NO:92, SEQ ID NO:96, SEQ ID NO:98, SEQ ID NO:100, SEQ ID NO:102, SEQ ID NO:104, SEQ ID NO:106, SEQ ID NO:108, and SEQ ID NO:110.

5. An isolated polypeptide of claim 3, wherein the isolated polypeptide comprises an amino acid sequence selected from the group consisting of SEQ ID NO:8, SEQ ID NO:10, SEQ ID NO:12, SEQ ID NO:14, SEQ ID NO:16, SEQ ID NO:112, SEQ ID NO:114, SEQ ID NO:116, SEQ ID NO:118, SEQ ID NO:120, SEQ ID NO:122, SEQ ID NO:124, SEQ ID NO:126, SEQ ID NO:128, SEQ ID NO:130, SEQ ID NO:136, SEQ ID NO:138, SEQ ID NO:144, SEQ ID NO:148, SEQ ID NO:152, and SEQ ID NO:154.

6. An isolated polypeptide of claim 3, wherein the isolated polypeptide comprises an amino acid sequence selected from the group consisting of SEQ ID NO:18, SEQ ID NO:20, SEQ ID NO:22, SEQ ID NO:24, SEQ ID NO:26, and SEQ ID NO:28.

7. An isolated polypeptide of claim 3, wherein the isolated polypeptide comprises an amino acid sequence selected from the group consisting of SEQ ID NO:30, SEQ ID NO:32, SEQ ID NO:34, SEQ ID NO:36, SEQ ID NO:38, SEQ ID NO:40, SEQ ID NO:42, SEQ ID NO:44, and SEQ ID NO:156

8. An isolated polypeptide of claim 3, wherein the isolated polypeptide comprises an amino acid sequence selected from the group consisting of SEQ ID NO:46, SEQ ID NO:48, SEQ ID NO:50, SEQ ID NO:52, and SEQ ID NO:54.

9. An isolated polypeptide of claim 3, wherein the isolated polypeptide comprises an amino acid sequence selected from the group consisting of SEQ ID NO:56, SEQ ID NO:58, and SEQ ID NO:168.

10. An isolated polypeptide of claim 3, wherein the isolated polypeptide comprises an amino acid sequence selected from the group consisting of SEQ ID NO:60, SEQ ID NO:62, SEQ ID NO:64, SEQ ID NO:66, SEQ ID NO:68, SEQ ID NO:70, SEQ ID NO:72, SEQ ID NO:74, SEQ ID NO:76, SEQ ID NO:78, and SEQ ID NO:170.

11. A method for identifying compounds that modulate target polypeptide activity comprising:
(a) combining a test compound with a target polypeptide and a substrate of the target polypeptide; and
(b) determining whether the test compound modulates the activity of the target polypeptide;
wherein the target polypeptide comprises an amino acid sequence selected from the group consisting of SEQ ID NO:2n, wherein n is an integer between 1 and 85, the amino acid sequence that is at least 95% identical to SEQ ID NO:2n, the amino acid sequence of at least one domain of SEQ ID NO:2n, and the amino acid sequence that is at least 95% identical to the at least one domain of SEQ ID NO:2n.

12. The method of claim 11, further comprising a step of identifying the test compound that modulates the target polypeptide activity by inhibiting the target polypeptide activity as an inhibitor of the target polypeptide activity.

13. The method of claim 11, further comprising a step of identifying the test compound that modulates the target polypeptide activity by inhibiting the target polypeptide activity as an antagonist of the target polypeptide.

14. The method of claim 11, further comprising a step of identifying the test compound that modulates the target polypeptide activity by activating the target polypeptide activity as an activator of the target polypeptide activity.

15. The method of claim 11, further comprising a step of identifying the test compound that modulates the target polypeptide activity by activating the target polypeptide activity as an agonist of the target polypeptide.

16. The method of claim 11, further comprising a step of identifying the test compound that modulates the target polypeptide activity as an enhancer of insulin secretion.

17. The method of claim 11, further comprising a step of identifying the test compound that modulates the target polypeptide activity as a therapeutic for treatment of insulin resistance.

18. The method of claim 11, further comprising a step of identifying the test compound that modulates the target polypeptide activity as a therapeutic for treatment of obesity.

19. The method of claim 11, further comprising a step of identifying the test compound that modulates the target polypeptide activity as a therapeutic for treatment of diabetes.

20. The method of claim 11, wherein the target polypeptide is an isolated polypeptide.

21. The method of claim 11, wherein the target polypeptide is produced by a process comprising culturing a recombinant host cell, the recombinant host cell comprising a nucleic acid encoding the target polypeptide, under conditions promoting expression of the target polypeptide.

22. The method of claim 21, wherein the nucleic acid comprises a nucleotide sequence selected from the group consisting of:
(a) SEQ ID NO:2n-1, wherein n is an integer between 1 and 85;
(b) nucleotides encoding an amino acid sequence of the at least one domain of SEQ ID NO:2n; and
c) a nucleotide sequence encoding an amino acid sequence selected from the group consisting of SEQ ID NO:2n, the amino acid sequence that is at least 95% identical to SEQ ID NO:2n, the amino acid sequence of at least one domain of SEQ ID NO:2n, and the amino acid sequence that is at least 95% identical to the at least one domain of SEQ ID NO:2n.

23. The method of claim 11, wherein the target polypeptide is produced by expression of a recombinant vector comprising a nucleic acid, the nucleic acid encoding an amino acid sequence selected from the group consisting of SEQ ID NO:2n, wherein n is an integer between 1 and 85, the amino acid sequence that is at least 95% identical to SEQ ID NO:2n, the amino acid sequence of at least one domain of SEQ ID NO:2n, and the amino acid sequence that is at least 95% identical to the at least one domain of SEQ ID NO:2n.

24. The method of claim 23, wherein the test compound is combined with the target polypeptide in a mammalian cell grown in culture.

25. The method of claim 23, wherein the test compound is combined with the target polypeptide in vitro.

26. The method of claim 23, wherein the nucleic acid comprises a nucleotide sequence selected from the group consisting of:
(a) SEQ ID NO:2n-1, wherein n is an integer between 1 and 85;
(b) nucleotides encoding an amino acid sequence of the at least one domain of SEQ ID NO:2n; and
c) a nucleotide sequence encoding an amino acid sequence selected from the group consisting of SEQ ID NO:2n, the amino acid sequence that is at least 95% identical to SEQ ID NO:2n, the amino acid sequence of at least one domain of SEQ ID NO:2n, and the amino acid sequence that is at least 95% identical to the at least one domain of SEQ ID NO:2n.

27. The method of claim 11, wherein the target polypeptide is produced by expression of an endogenous nucleic acid, the endogenous nucleic acid encoding an amino acid sequence selected from the group consisting of SEQ ID NO:2n, wherein n is an integer between 1 and 85, the amino acid sequence that is at least 95% identical to SEQ ID NO:2n, the amino acid sequence of at least one domain of SEQ ID NO:2n; and the amino acid sequence that is at least 95% identical to the at least one domain of SEQ ID NO:2n.

28. The method of claim 27, wherein the test compound is combined with the target polypeptide in a mammalian cell grown in culture.

29. The method of claim 27, wherein the test compound is combined with the target polypeptide in vitro.

30. The method of claim 27, wherein the endogenous nucleic acid comprises a nucleotide sequence selected from the group consisting of:
(a) SEQ ID NO:2n-1, wherein n is an integer between 1 and 85;
(b) nucleotides encoding an amino acid sequence of the at least one domain of SEQ ID NO:2n; and
(c) a nucleotide sequence encoding an amino acid sequence selected from the group consisting of SEQ ID NO:2n, the amino acid sequence that is at least 95% identical to SEQ ID NO:2n, the amino acid sequence of at least one domain of SEQ ID NO:2n, and the amino acid sequence that is at least 95% identical to the at least one domain of SEQ ID NO:2n.

31. An antibody that immunospecifically binds to the target polypeptide,
wherein the target polypeptide comprises an amino acid sequence selected from the group consisting of SEQ ID NO:2n, wherein n is an integer between 1 and 85, the amino acid sequence that is at least 95% identical to SEQ ID NO:2n, the amino acid sequence of at least one domain of SEQ ID NO:2n, and the amino acid sequence that is at least 95% identical to the at least one domain of SEQ ID NO:2n.

32. The antibody of claim 31, wherein the antibody is a monoclonal antibody.

33. The antibody of claim 31, wherein the antibody is a humanized antibody.

34. The antibody of claim 31, wherein the antibody is a human antibody.

35. A method for identifying a potential therapeutic agent for use in treatment of a pathology, wherein the pathology is related to aberrant expression or aberrant physiological interactions of a target polypeptide, the method comprising:
(a) providing a cell expressing the target polypeptide and having a property or function ascribable to the target polypeptide;
(b) contacting the cell with a composition comprising a candidate test compound; and
(c) determining whether the test compound alters the property or function ascribable to the target polypeptide;
whereby, if an alteration observed in the presence of the test compound is not observed when the cell is contacted with the composition in the absence of the test compound, the test compound is identified as a potential therapeutic agent; and
wherein the target polypeptide comprises an amino acid sequence selected from the group consisting of SEQ ID NO:2n, wherein n is an integer between 1 and 85, the amino acid sequence that is at least 95% identical to SEQ ID NO:2n, the amino acid sequence of at least one domain of SEQ ID NO:2n, and the amino acid sequence that is at least 95% identical to the at least one domain of SEQ ID NO:2n.

36. A method for screening for a modulator of activity of or of latency or predisposition to a pathology associated with a target polypeptide, the method comprising:
(a) administering a test compound to a test animal at an increased risk for a pathology associated with the target polypeptide, wherein the test animal recombinantly expresses the target polypeptide;
(b) measuring the activity of the target polypeptide in the test animal after administering the test compound of step (a); and
(c) comparing the activity of the target polypeptide in the test animal with the activity of the target polypeptide in a control animal not administered the test compound, wherein a change in the activity of the target polypeptide in the test animal relative to the control animal indicates that the test compound is a modulator of activity of or of latency or predisposition to, a pathology associated with the target polypeptide;
wherein the target polypeptide comprises an amino acid sequence selected from the group consisting of SEQ ID NO:2n, wherein n is an integer between 1 and 85, the amino acid sequence that is at least 95% identical to SEQ ID NO:2n, the amino acid sequence of at least one domain of SEQ ID NO:2n, and the amino acid sequence that is at least 95% identical to the at least one domain of SEQ ID NO:2n.
